(19) United States
(12) Patent Application Publication
(10) Pub. No.: US 2006/0127891 A1
(43) Pub. Date: Jun. 15, 2006

(54) RNA interference mediated inhibition of MAP kinase gene expression or expression of genes involved in MAP kinase pathway using short interfering nucleic acid (siNA)

(76) Inventors: James McSwiggen, Boulder, CO (US); Leonid Beigelman, Longmont, CO (US); Nassim Usman, Lafayette, CO (US); Peter Haeberli, Berthoud, CO (US); Bharat Chowrira, Louisville, CO (US); Barry Polisky, Boulder, CO (US)

Correspondence Address: Anita J. Terpstra, Ph. D.;McDonnell Boehnen Hulbert & Berghoff, 32nd Floor, 300 S. Wacker Drive, Chicago, IL, 60606, US

(21) Appl. No.: 10/424,339

(22) Filed: Apr. 25, 2003

Related U.S. Application Data
(63) Continuation-in-part of application No. PCT/US03/02510, filed on Jan. 28, 2003.
(63) Continuation-in-part of application No. PCT/US03/05346, filed on Feb. 20, 2003.
(63) Continuation-in-part of application No. PCT/US03/05028, filed on Feb. 20, 2003.
(60) Provisional application No. 60/358,580, filed on Feb. 20, 2002.
(60) Provisional application No. 60/363,124, filed on Mar. 11, 2002.
(60) Provisional application No. 60/386,782, filed on Jun. 6, 2002.
(60) Provisional application No. 60/406,784, filed on Aug. 29, 2002.
(60) Provisional application No. 60/408,378, filed on Sep. 5, 2002.
(60) Provisional application No. 60/409,293, filed on Sep. 9, 2002.
(60) Provisional application No. 60/440,129, filed on Jan. 15, 2003.

(51) Int. Cl. A61K 48/00; C07H 21/02; C12Q 1/68

(52) U.S. Cl. 435/6; 514/44; 536/23.1

(57) ABSTRACT

The present invention concerns methods and reagents useful in modulating MAP kinase gene expression in a variety of applications, including use in therapeutic, diagnostic, target validation, and genomic discovery applications. Specifically, the invention relates to small nucleic acid molecules, such as short interfering nucleic acid (siNA), short interfering RNA (siRNA), double-stranded RNA (dsRNA), micro-RNA (miRNA), and short hairpin RNA (shRNA) molecules capable of mediating RNA interference (RNAi) against c-JUN, JNK, p38, and ERK gene expression, useful in the treatment of cancer, inflammation, obesity and insulin resistance (e.g. Type I and Type II diabetes).

[0001] This application is a continuation-in-part of International Patent Application No. PCT/US03/02510, filed Jan. 28, 2002, and is a continuation-in-part of International Patent Application No. PCT/US03/05346, filed Feb. 20, 2003, and is a continuation-in-part of International Patent Application No. PCT/US03/05028, filed Feb. 20, 2003, all of which claim the benefit of U.S. Provisional Application No. 60/358,580 filed Feb. 20, 2002, U.S. Provisional Application No. 60/363,124 filed Mar. 11, 2002, U.S. Provisional Application No. 60/386,782 filed Jun. 6, 2002, U.S. Provisional Application No. 60/406,784 filed Aug. 29, 2002, U.S. Provisional Application No. 60/408,378 filed Sep. 5, 2002, U.S. Provisional Application No. 60/409,293 filed Sep. 9, 2002, and U.S. Provisional Application No. 60/440,129 filed Jan. 15, 2003. The instant application claims the benefit of all the listed applications, which are hereby incorporated by reference herein in their entireties, including the drawings.

### FIELD OF THE INVENTION

[0002] The present invention concerns compounds, compositions, and methods for the study, diagnosis, and treatment of conditions and diseases that respond to the modulation of mitogen activated protein kinase (MAP kinase) gene expression and/or activity. The present invention also concerns compounds, compositions, methods relating to the modulation of expression or activity of genes involved in the MAP kinase pathway. Specifically, the invention relates to small nucleic acid molecules, such as short interfering nucleic acid (siNA), short interfering RNA (siRNA), double-stranded RNA (dsRNA), micro-RNA (miRNA), and short hairpin RNA (shRNA) molecules capable of mediating RNA interference (RNAi) against genes involved in the Jun amino-terminal kinase (JNK), p38, and/or ERK pathway, such as c-JUN. More specifically, the invention relates to small nucleic acid molecules, such as short interfering nucleic acid (siNA), short interfering RNA (siRNA), double-stranded RNA (dsRNA), micro-RNA (miRNA), and short hairpin RNA (shRNA) molecules capable of mediating RNA interference (RNAi) against Jun amino-terminal kinase (JNK), p38, ERK, and/or c-JUN genes.

### BACKGROUND OF THE INVENTION

[0003] The following is a discussion of relevant art pertaining to RNAi. The discussion is provided only for understanding of the invention that follows. The summary is not an admission that any of the work described below is prior art to the claimed invention.

[0004] RNA interference refers to the process of sequence-specific post-transcriptional gene silencing in animals mediated by short interfering RNAs (siRNAs) (Fire et al., 1998, Nature, 391, 806). The corresponding process in plants is commonly referred to as post-transcriptional gene silencing or RNA silencing and is also referred to as quelling in fungi. The process of post-transcriptional gene silencing is thought to be an evolutionarily-conserved cellular defense mechanism used to prevent the expression of foreign genes and is commonly shared by diverse flora and phyla (Fire et al., 1999, Trends Genet., 15, 358). Such protection from foreign gene expression may have evolved in response to the production of double-stranded RNAs (dsRNAs) derived from viral infection or from the random integration of transposon elements into a host genome via a cellular response that specifically destroys homologous single-stranded RNA or viral genomic RNA. The presence of dsRNA in cells triggers the RNAi response though a mechanism that has yet to be fully characterized. This mechanism appears to be different from the interferon response that results from dsRNA-mediated activation of protein kinase PKR and 2′,5′-oligoadenylate synthetase resulting in non-specific cleavage of mRNA by ribonuclease L.

[0005] The presence of long dsRNAs in cells stimulates the activity of a ribonuclease III enzyme referred to as dicer. Dicer is involved in the processing of the dsRNA into short pieces of dsRNA known as short interfering RNAs (siRNAs) (Berstein et al., 2001, Nature, 409, 363). Short interfering RNAs derived from dicer activity are typically about 21 to about 23 nucleotides in length and comprise about 19 base pair duplexes (Elbashir et al., 2001, Genes Dev., 15, 188). Dicer has also been implicated in the excision of 21- and 22-nucleotide small temporal RNAs (stRNAs) from precursor RNA of conserved structure that are implicated in translational control (Hutvagner et al., 2001, Science, 293, 834). The RNAi response also features an endonuclease complex, commonly referred to as an RNA-induced silencing complex (RISC), which mediates cleavage of single-stranded RNA having sequence complementary to the antisense strand of the siRNA duplex. Cleavage of the target RNA takes place in the middle of the region complementary to the antisense strand of the siRNA duplex (Elbashir et al., 2001, Genes Dev., 15, 188).

[0006] RNAi has been studied in a variety of systems. Fire et al., 1998, Nature, 391, 806, were the first to observe RNAi in C. elegans. Wianny and Goetz, 1999, Nature Cell Biol., 2, 70, describe RNAi mediated by dsRNA in mouse embryos. Hammond et al., 2000, Nature, 404, 293, describe RNAi in Drosophila cells transfected with dsRNA. Elbashir et al., 2001, Nature, 411, 494, describe RNAi induced by introduction of duplexes of synthetic 21-nucleotide RNAs in cultured mammalian cells including human embryonic kidney and HeLa cells. Recent work in Drosophila embryonic lysates (Elbashir et al., 2001, EMBO J., 20, 6877) has revealed certain requirements for siRNA length, structure, chemical composition, and sequence that are essential to mediate efficient RNAi activity. These studies have shown that 21-nucleotide siRNA duplexes are most active when containing 3′-terminal dinucleotide overhangs. Furthermore, complete substitution of one or both siRNA strands with 2′-deoxy (2′-H) or 2′-O-methyl nucleotides abolishes RNAi activity, whereas substitution of the 3′-terminal siRNA overhang nucleotides with 2′-deoxy nucleotides (2′-H) was shown to be tolerated. Single mismatch sequences in the center of the siRNA duplex were also shown to abolish RNAi activity. In addition, these studies also indicate that the position of the cleavage site in the target RNA is defined by the 5′-end of the siRNA guide sequence rather than the 3′-end of the guide sequence (Elbashir et al., 2001, EMBO J., 20, 6877). Other studies have indicated that a 5′-phosphate on the target-complementary strand of a siRNA duplex is required for siRNA activity and that ATP is utilized to maintain the 5′-phosphate moiety on the siRNA (Nykanen et al., 2001, Cell, 107, 309).

[0007] Studies have shown that replacing the 3′-terminal nucleotide overhanging segments of a 21-mer siRNA duplex having two -nucleotide 3′-overhangs with deoxyribonucleotides does not have an adverse effect on RNAi activity. Replacing up to four nucleotides on each end of the siRNA with deoxyribonucleotides has been reported to be well tolerated, whereas complete substitution with deoxyribonucleotides results in no RNAi activity (Elbashir et al., 2001, EMBO J., 20, 6877). In addition, Elbashir et al., supra, also report that substitution of siRNA with 2′-O-methyl nucleotides completely abolishes RNAi activity. Li et al., International PCT Publication No. WO 00/44914, and Beach et al., International PCT Publication No. WO 01/68836 preliminarily suggest that siRNA may include modifications to either the phosphate-sugar backbone or the nucleoside to include at least one of a nitrogen or sulfur heteroatom, however, neither application postulates to what extent such modifications would be tolerated in siRNA molecules, nor provides any further guidance or examples of such modified siRNA. Kreutzer et al., Canadian Patent Application No. 2,359,180, also describe certain chemical modifications for use in dsRNA constructs in order to counteract activation of double-stranded RNA-dependent protein kinase PKR, specifically 2′-amino or 2′-O-methyl nucleotides, and nucleotides containing a 2′-O or 4′-C methylene bridge. However, Kreutzer et al. similarly fails to provide examples or guidance as to what extent these modifications would be tolerated in siRNA molecules.

[0008] Parrish et al., 2000, Molecular Cell, 6, 1977-1087, tested certain chemical modifications targeting the unc-22 gene in C. elegans using long (>25 nt) siRNA transcripts. The authors describe the introduction of thiophosphate residues into these siRNA transcripts by incorporating thiophosphate nucleotide analogs with T7 and T3 RNA polymerase and observed that RNAs with two phosphorothioate modified bases also had substantial decreases in effectiveness as RNAi. Further, Parrish et al. reported that phosphorothioate modification of more than two residues greatly destabilized the RNAs in vitro such that interference activities could not be assayed. Id. at 1081. The authors also tested certain modifications at the 2′-position of the nucleotide sugar in the long siRNA transcripts and found that substituting deoxynucleotides for ribonucleotides produced a substantial decrease in interference activity, especially in the case of Uridine to Thymidine and/or Cytidine to deoxy-Cytidine substitutions. Id. In addition, the authors tested certain base modifications, including substituting, in sense and antisense strands of the siRNA, 4-thiouracil, 5-bromouracil, 5-iodouracil, and 3-(aminoallyl)uracil for uracil, and inosine for guanosine. Whereas 4-thiouracil and 5-bromouracil substitution appeared to be tolerated, Parrish reported that inosine produced a substantial decrease in interference activity when incorporated in either strand. Parrish also reported that incorporation of 5-iodouracil and 3-(aminoallyl)uracil in the antisense strand resulted in a substantial decrease in RNAi activity as well.

[0009] The use of longer dsRNA has been described. For example, Beach et al., International PCT Publication No. WO 01/68836, describes specific methods for attenuating gene expression using endogenously-derived dsRNA. Tuschl et al., International PCT Publication No. WO 01/75164, describe a Drosophila in vitro RNAi system and the use of specific siRNA molecules for certain functional genomic and certain therapeutic applications; although Tuschl, 2001, Chem. Biochem., 2, 239-245, doubts that RNAi can be used to cure genetic diseases or viral infection due to the danger of activating interferon response. Li et al., International PCT Publication No. WO 00/44914, describe the use of specific dsRNAs for attenuating the expression of certain target genes. Zernicka-Goetz et al., International PCT Publication No. WO 01/36646, describe certain methods for inhibiting the expression of particular genes in mammalian cells using certain dsRNA molecules. Fire et al., International PCT Publication No. WO 99/32619, describe particular methods for introducing certain dsRNA molecules into cells for use in inhibiting gene expression. Plaetinck et al., International PCT Publication No. WO 00/01846, describe certain methods for identifying specific genes responsible for conferring a particular phenotype in a cell using specific dsRNA molecules. Mello et al., International PCT Publication No. WO 01/29058, describe the identification of specific genes involved in dsRNA-mediated RNAi. Deschamps Depaillette et al., International PCT Publication No. WO 99/07409, describe specific compositions consisting of particular dsRNA molecules combined with certain anti-viral agents. Waterhouse et al., International PCT Publication No. 99/53050, describe certain methods for decreasing the phenotypic expression of a nucleic acid in plant cells using certain dsRNAs. Driscoll et al., International PCT Publication No. WO 01/49844, describe specific DNA constructs for use in facilitating gene silencing in targeted organisms.

[0010] Others have reported on various RNAi and gene-silencing systems. For example, Parrish et al., 2000, Molecular Cell, 6, 1977-1087, describe specific chemically-modified siRNA constructs targeting the unc-22 gene of C. elegans. Grossniklaus, International PCT Publication No. WO 01/38551, describes certain methods for regulating polycomb gene expression in plants using certain dsRNAs. Churikov et al., International PCT Publication No. WO 01/42443, describe certain methods for modifying genetic characteristics of an organism using certain dsRNAs. Cogoni et al., International PCT Publication No. WO 01/53475, describe certain methods for isolating a Neurospora silencing gene and uses thereof. Reed et al., International PCT Publication No. WO 01/68836, describe certain methods for gene silencing in plants. Honer et al., International PCT Publication No. WO 01/70944, describe certain methods of drug screening using transgenic nematodes as Parkinson's Disease models using certain dsRNAs. Deak et al., International PCT Publication No. WO 01/72774, describe certain Drosophila-derived gene products that may be related to RNAi in Drosophila. Arndt et al., International PCT Publication No. WO 01/92513 describe certain methods for mediating gene suppression by using factors that enhance RNAi. Tuschl et al., International PCT Publication No. WO 02/44321, describe certain synthetic siRNA constructs. Pachuk et al., International PCT Publication No. WO 00/63364, and Satishchandran et al., International PCT Publication No. WO 01/04313, describe certain methods and compositions for inhibiting the function of certain polynucleotide sequences using certain dsRNAs. Echeverri et al., International PCT Publication No. WO 02/38805, describe certain C. elegans genes identified via RNAi. Kreutzer et al., International PCT Publications Nos. WO 02/055692, WO 02/055693, and EP 1144623 B1 describes certain methods for inhibiting gene expression using RNAi. Graham et al., International PCT Publications Nos. WO 99/49029 and WO 01/70949, and AU 4037501 describe certain vector expressed siRNA molecules. Fire et al., U.S. Pat. No. 6,506,559, describe certain methods for inhibiting gene expression in vitro using certain long dsRNA (greater than 25 nucleotide) constructs that mediate RNAi.

### SUMMARY OF THE INVENTION

[0011] This invention relates to compounds, compositions, and methods useful for modulating the expression of genes associated with mitogen activated protein kinase (MAP kinase) gene expression pathways (see for example FIG. 12) by RNA interference (RNAi) using short interfering nucleic acid (siNA) molecules. In particular, the instant invention features small nucleic acid molecules, such as short interfering nucleic acid (siNA), short interfering RNA (siRNA), double-stranded RNA (dsRNA), micro-RNA (miRNA), and short hairpin RNA (shRNA) molecules and methods used to modulate the expression of MAP kinase genes, including c-JUN, JNK genes such as JNK1 and JNK2, ERK genes such as ERK1 and ERK2, and p38 genes. A siNA of the invention can be unmodified or chemically-modified. A siNA of the instant invention can be chemically synthesized, expressed from a vector or enzymatically synthesized. The instant invention also features various chemically-modified synthetic short interfering nucleic acid (siNA) molecules capable of modulating telomerase gene expression or activity in cells by RNA interference (RNAi). The use of chemically-modified siNA improves various properties of native siNA molecules through increased resistance to nuclease degradation in vivo and/or through improved cellular uptake. Further, contrary to earlier published studies, siNA having multiple chemical modifications retains its RNAi activity. The siNA molecules of the instant invention provide useful reagents and methods for a variety of therapeutic, diagnostic, target validation, genomic discovery, genetic engineering, and pharmacogenomic applications.

[0012] In one embodiment, the invention features one or more siNA molecules and methods that independently or in combination modulate the expression of gene(s) encoding MAP kinase proteins, such as genes encoding sequences comprising those sequences referred to by GenBank Accession Nos. shown in Table I, referred to herein generally as MAP kinases. The description below of the various aspects and embodiments of the invention is provided with reference to exemplary MAP kinases such as JNK1 (also referred to as MAPK8, for example Genbank Accession No. NM_{—}002750), p38 (also referred to as MAPK14, for example Genbank Accession No. NM_{—}139012), ERK2 (also referred to as MAPK1, for example Genbank Accession No. NM_{—}002745), and ERK1 (also referred to as MAPK3, for example Genbank Accession XM_{—}055766) genes. However, the various aspects and embodiments are also directed to other MAP kinases referred to by Accession number in Table 1 and other genes involved in MAP kinase pathways such those genes encoding c-JUN (for example Genbank Accession No. NM_{—}002228), TNF-alpha (for example Genbank Accession No. M10988), interleukins such as IL-8 (for example Genbank Accession No. M68932), and activating proteins such as AP-1 (for example Genbank Accession No. NM_{—}013277). The various aspects and embodiments are also directed to other genes that are involved in the MAP kinase pathways of gene expression. Those additional genes can be analyzed for target sites using the methods described for MAP kinase genes herein. Thus, the inhibition and the effects of such inhibition of the other genes can be performed as described herein.

[0013] In one embodiment, the invention features a siNA molecule that down-regulates expression of a MAP kinase gene, for example, wherein the MAP kinase gene comprises MAP kinase encoding sequence (e.g., c-JUN, JNK1, JNK2, p38, ERK1, or ERK2).

[0014] In one embodiment, the invention features a siNA molecule having RNAi activity against MAP kinase RNA, wherein the siNA molecule comprises a sequence complementary to an RNA having MAP kinase encoding sequence, such as those sequences having MAP kinase GenBank Accession Nos. shown in Table I. In another embodiment, the invention features a siNA molecule having RNAi activity against MAP kinase RNA, wherein the siNA molecule comprises a sequence complementary to an RNA having other MAP kinase encoding sequence, such as mutant MAP kinase genes, splice variants of MAP kinase genes, and other MAP kinase ligands and receptors. Chemical modifications as shown in Tables III and IV or otherwise described herein can be applied to any siNA construct of the invention.

[0015] In another embodiment, the invention features a siNA molecule having RNAi activity against a MAP kinase gene, wherein the siNA molecule comprises nucleotide sequence complementary to nucleotide sequence of a MAP kinase gene, such as those MAP kinase sequences having GenBank Accession Nos. shown in Table I or other MAP kinase encoding sequence, such as mutant MAP kinase genes, splice variants of MAP kinase genes, and other MAP kinase ligands and receptors. In another embodiment, a siNA molecule of the invention includes nucleotide sequence that can interact with nucleotide sequence of a MAP kinase gene and thereby mediate silencing of MAP kinase gene expression, for example, wherein the siNA mediates regulation of MAP kinase gene expression by cellular processes that modulate the chromatin structure of the MAP kinase gene and prevent transcription of the MAP kinase gene.

[0016] In another embodiment, the invention features a siNA molecule comprising nucleotide sequence, for example, nucleotide sequence in the antisense region of the siNA molecule, that is complementary to a nucleotide sequence or portion of sequence of a MAP kinase gene. In another embodiment, the invention features a siNA molecule comprising a region, for example, the antisense region of the siNA construct, complementary to a sequence comprising a MAP kinase gene sequence or a portion thereof.

[0017] In one embodiment, the antisense region of ERK2 siNA constructs can comprise a sequence complementary to sequence having any of SEQ ID NOs. 1-163, or 1113-1116. The antisense region can also comprise sequence having any of SEQ ID NOs. 164-326, 1133-1136, 1141-1144, or 1149-1152. In another embodiment, the sense region of ERK2 siNA constructs can comprise sequence having any of SEQ ID NOs. 1-163, 1113-1116, 1129-1132, 1137-1140, or 1145-1148.

[0018] In one embodiment, the antisense region of ERK1 siNA constructs can comprise a sequence complementary to sequence having any of SEQ ID NOs. 327-431, or 1117-1120. The antisense region can also comprise sequence having any of SEQ ID NOs. 432-536, 1157-1160, 1165-1168, or 1173-1176. In another embodiment, the sense region of ERK1 siNA constructs can comprise sequence having any of SEQ ID NOs. 327-431, 1117-1120, 1153-1156, 1161-1164, or 1169-1172.

[0019] In one embodiment, the antisense region of JNK1 siNA constructs can comprise a sequence complementary to sequence having any of SEQ ID NOs. 537-615 or 1121-1124. The antisense region can also comprise sequence having any of SEQ ID NOs. 616-694, 1181-1184, 1189-1192, 1197-1200, 1237, 1239, 1241, 1243, 1245, or 1246. In another embodiment, the sense region of JNK1 constructs can comprise sequence having any of SEQ ID NOs. 537-615, 1121-1124, 1177-1180, 1185-1188, 1193-1196, 1236, 1238, 1240, 1242, or 1244. The sense region can comprise a sequence of SEQ ID NO. 1225 and the antisense region can comprise a sequence of SEQ ID NO. 1226. The sense region can comprise a sequence of SEQ ID NO. 1227 and the antisense region can comprise a sequence of SEQ ID NO. 1228. The sense region can comprise a sequence of SEQ ID NO. 1229 and the antisense region can comprise a sequence of SEQ ID NO. 1230. The sense region can comprise a sequence of SEQ ID NO. 1231 and the antisense region can comprise a sequence of SEQ ID NO. 1232. The sense region can comprise a sequence of SEQ ID NO. 1233 and the antisense region can comprise a sequence of SEQ ID NO. 1234. The sense region can comprise a sequence of SEQ ID NO. 1231 and the antisense region can comprise a sequence of SEQ ID NO. 1235.

[0020] In one embodiment, the antisense region of p38 siNA constructs can comprise a sequence complementary to sequence having any of SEQ ID NOs. 695-903 or 1125-1128. The antisense region can also comprise sequence having any of SEQ ID NOs. 904-1112, 1205-1208, 1213-1216, or 1221-1224. In another embodiment, the sense region of p38 siNA constructs can comprise sequence having any of SEQ ID NOs. 695-903, 1125-1128, 1201-1204, 1209-1212, or 1217-1220.

[0021] In one embodiment, the antisense region of c-JUN siNA constructs can comprise a sequence complementary to sequence having any of SEQ ID NOs. 1247-1427 or 1609-1616. In one embodiment, the antisense region of c-JUN siNA constructs can comprise sequence having any of SEQ ID NOs. 1428-1608, 1625-1632, 1641-1648, 1657-1664, 1673-1680, 1698, 1700, 1702, 1705, 1707, 1709, 1711, or 1714. In another embodiment, the sense region of c-JUN siNA constructs can comprise sequence having any of SEQ ID NOs. 1247-1427, 1609-1616, 1617-1624, 1633-1640, 1649-1656, 1665-1672, 1697, 1699, 1701, 1703, 1704, 1706, 1708, 1710, 1712, or 1713.

[0022] In one embodiment, a siNA molecule of the invention comprises any of SEQ ID NOs. 1-1714. The sequences shown in SEQ ID NOs: 1-1714 are not limiting. A siNA molecule of the invention can comprise any contiguous MAP kinase sequence (e.g., about 19 to about 25, or about 19, 20, 21, 22, 23, 24 or 25 contiguous MAP kinase nucleotides).

[0023] In yet another embodiment, the invention features a siNA molecule comprising a sequence, for example, the antisense sequence of the siNA construct, complementary to a sequence or portion of sequence comprising sequence represented by GenBank Accession Nos. shown in Table I. Chemical modifications in Tables III and IV and described herein can be applied to any siRNA costruct of the invention.

[0024] In one embodiment of the invention a siNA molecule comprises an antisense strand having about 19 to about 29 nucleotides, wherein the antisense strand is complementary to a RNA sequence encoding a MAP kinase protein, and wherein said siNA further comprises a sense strand having about 19 to about 29 (e.g., about 19, 20, 21, 22, 23, 24, 25, 26, 27, 28 or 29) nucleotides, and wherein said sense strand and said antisense strand are distinct nucleotide sequences with at least about 19 complementary nucleotides.

[0025] In another embodiment of the invention a siNA molecule of the invention comprises an antisense region having about 19 to about 29 (e.g., about 19, 20, 21, 22, 23, 24, 25, 26, 27, 28 or 29) nucleotides, wherein the antisense region is complementary to a RNA sequence encoding a MAP kinase protein, and wherein said siNA further comprises a sense region having about 19 to about 29 nucleotides, wherein said sense region and said antisense region comprise a linear molecule with at least about 19 complementary nucleotides.

[0026] In one embodiment of the invention a siNA molecule comprises an antisense strand comprising a nucleotide sequence that is complementary to a nucleotide sequence encoding a MAP kinase protein or a portion thereof The siNA further comprises a sense strand, wherein said sense strand comprises a nucleotide sequence of a MAP kinase gene or a portion thereof.

[0027] In another embodiment, a siNA molecule comprises an antisense region comprising a nucleotide sequence that is complementary to a nucleotide sequence encoding a MAP kinase protein or a portion thereof. The siNA molecule further comprises a sense region, wherein said sense region comprises a nucleotide sequence of a MAP kinase gene or a portion thereof.

[0028] In one embodiment, a siNA molecule of the invention has RNAi activity that modulates expression of RNA encoded by a MAP kinase gene. Because MAP kinase genes can share some degree of sequence homology with each other, siNA molecules can be designed to target a class of MAP kinase genes (and associated receptor or ligand genes) or alternately specific MAP kinase genes by selecting sequences that are either shared amongst different MAP kinase targets or alternatively that are unique for a specific MAP kinase target. Therefore, in one embodiment, the siNA molecule can be designed to target conserved regions of MAP kinase RNA sequence having homology between several MAP kinase genes so as to target several MAP kinase genes (e.g., different MAP kinase isoforms, splice variants, mutant genes etc.) with one siNA molecule. In another embodiment, the siNA molecule can be designed to target a sequence that is unique to a specific MAP kinase RNA sequence due to the high degree of specificity that the siNA molecule requires to mediate RNAi activity.

[0029] In one embodiment, nucleic acid molecules of the invention that act as mediators of the RNA interference gene silencing response are double-stranded nucleic acid molecules. In another embodiment, the siNA molecules of the invention consist of duplexes containing about 19 base pairs between oligonucleotides comprising about 19 to about 25 (e.g., about 19, 20, 21, 22, 23, 24 or 25) nucleotides. In yet another embodiment, siNA molecules of the invention comprise duplexes with overhanging ends of about 1 to about 3 (e.g., about 1, 2, or 3) nucleotides, for example, about 21-nucleotide duplexes with about 19 base pairs and 3′-terminal mononucleotide, dinucleotide, or trinucleotide overhangs.

[0030] In one embodiment, the invention features one or more chemically-modified siNA constructs having specificity for MAP kinase expressing nucleic acid molecules, such as RNA encoding a MAP kinase protein. Non-limiting examples of such chemical modifications include without limitation phosphorothioate internucleotide linkages, 2′-deoxyribonucleotides, 2′-O-methyl ribonucleotides, 2′-deoxy-2′-fluoro ribonucleotides, “universal base” nucleotides, “acyclic” nucleotides, 5-C-methyl nucleotides, and terminal glyceryl and/or inverted deoxy abasic residue incorporation. These chemical modifications, when used in various siNA constructs, are shown to preserve RNAi activity in cells while at the same time, dramatically increasing the serum stability of these compounds. Furthermore, contrary to the data published by Parrish et al., supra, applicant demonstrates that multiple (greater than one) phosphorothioate substitutions are well-tolerated and confer substantial increases in serum stability for modified siNA constructs.

[0031] In one embodiment, a siNA molecule of the invention comprises modified nucleotides while maintaining the ability to mediate RNAi. The modified nucleotides can be used to improve in vitro or in vivo characteristics such as stability, activity, and/or bioavailability. For example, a siNA molecule of the invention can comprise modified nucleotides as a percentage of the total number of nucleotides present in the siNA molecule. As such, a siNA molecule of the invention can generally comprise about 5% to about 100% modified nucleotides (e.g., 5%, 10%, 15%, 20%, 25%, 30%, 35%, 40%, 45%, 50%, 55%, 60%, 65%, 70%, 75%, 80%, 85%, 90%, 95% or 100% modified nucleotides). The actual percentage of modified nucleotides present in a given siNA molecule will depend on the total number of nucleotides present in the siNA. If the siNA molecule is single stranded, the percent modification can be based upon the total number of nucleotides present in the single stranded siNA molecules. Likewise, if the siNA molecule is double stranded, the percent modification can be based upon the total number of nucleotides present in the sense strand, antisense strand, or both the sense and antisense strands.

[0032] In one embodiment, the invention features a double-stranded short interfering nucleic acid (siNA) molecule that down-regulates expression of a MAP kinase gene, wherein the siNA molecule comprises one or more chemical modifications and each strand of the double-stranded siNA is about 21 nucleotides long.

[0033] In one embodiment, a siNA molecule of the invention does not contain any ribonucleotides. In another embodiment, a siNA molecule of the invention comprises one or more ribonucleotides.

[0034] In one embodiment, the invention features a double-stranded short interfering nucleic acid (siNA) molecule that down-regulates expression of a MAP kinase gene, wherein one of the strands of the double-stranded siNA molecule comprises a nucleotide sequence that is complementary to a nucleotide sequence of the MAP kinase gene or a portion thereof, and wherein the second strand of the double-stranded siNA molecule comprises a nucleotide sequence substantially similar to the nucleotide sequence of the MAP kinase gene or a portion thereof.

[0035] In one embodiment, the invention features a double-stranded short interfering nucleic acid (siNA) molecule that down-regulates expression of a MAP kinase gene, wherein each strand of the siNA molecule comprises about 19 to about 23 nucleotides, and wherein each strand comprises at least about 19 nucleotides that are complementary to the nucleotides of the other strand.

[0036] In one embodiment, the invention features a double-stranded short interfering nucleic acid (siNA) molecule that down-regulates expression of a MAP kinase gene, wherein the siNA molecule comprises an antisense region comprising a nucleotide sequence that is complementary to a nucleotide sequence of the MAP kinase gene or a portion thereof, and wherein the siNA further comprises a sense region, wherein the sense region comprises a nucleotide sequence substantially similar to the nucleotide sequence of the MAP kinase gene or a portion thereof.

[0037] In one embodiment, the invention features a double-stranded short interfering nucleic acid (siNA) molecule that down-regulates expression of a MAP kinase gene, wherein the antisense region and the sense region each comprise about 19 to about 23 nucleotides, and wherein the antisense region comprises at least about 19 nucleotides that are complementary to nucleotides of the sense region.

[0038] In one embodiment, the invention features a double-stranded short interfering nucleic acid (siNA) molecule that down-regulates expression of a MAP kinase gene, wherein the siNA molecule comprises a sense region and an antisense region and wherein the antisense region comprises a nucleotide sequence that is complementary to a nucleotide sequence of RNA encoded by the MAP kinase gene or a portion thereof and the sense region comprises a nucleotide sequence that is complementary to the antisense region.

[0039] In one embodiment, the invention features a double-stranded short interfering nucleic acid (siNA) molecule that down-regulates expression of a MAP kinase gene, wherein the siNA molecule is assembled from two separate oligonucleotide fragments wherein one fragment comprises the sense region and the second fragment comprises the antisense region of the siNA molecule. The sense region can be connected to the antisense region via a linker molecule, such as a polynucleotide linker or a non-nucleotide linker.

[0040] In one embodiment, the invention features a double-stranded short interfering nucleic acid (siNA) molecule that down-regulates expression of a MAP kinase gene, wherein the siNA molecule comprises a sense region and an antisense region and wherein the antisense region comprises a nucleotide sequence that is complementary to a nucleotide sequence of RNA encoded by the MAP kinase gene or a portion thereof and the sense region comprises a nucleotide sequence that is complementary to the antisense region, wherein the siNA molecule has one or more modified pyrimidine and/or purine nucleotides. In one embodiment, the pyrimidine nucleotides in the sense region are 2′-O-methyl pyrimidine nucleotides, or 2′-deoxy-2′-fluoro pyrimidine nucleotides and the purine nucleotides present in the sense region are 2′-deoxy purine nucleotides. In another embodiment, the pyrimidine nucleotides in the sense region are 2′-deoxy-2′-fluoro pyrimidine nucleotides and the purine nucleotides present in the sense region are 2′-O-methyl purine nucleotides. In another embodiment of any of the above described siNA molecules, any nucleotides present in a non-complementary region of the sense strand (e.g. overhang region) are 2′-deoxy nucleotides.

[0041] In one embodiment, the invention features a double-stranded short interfering nucleic acid (siNA) molecule that down-regulates expression of a MAP kinase gene, wherein the siNA molecule is assembled from two separate oligonucleotide fragments wherein one fragment comprises the sense region and the second fragment comprises the antisense region of the siNA molecule, and wherein the fragment comprising the sense region includes a terminal cap moiety at the 5′-end, the 3′-end, or both of the 5′ and 3′ ends of the fragment comprising the sense region. In one embodiment, the terminal cap moiety is an inverted deoxy abasic moiety or glyceryl moiety. In one embodiment, each of the two fragments of the siNA molecule comprises about 21 nucleotides.

[0042] In one embodiment, the invention features a double-stranded short interfering nucleic acid (siNA) molecule that down-regulates expression of a MAP kinase gene, wherein the siNA molecule comprises a sense region and an antisense region and wherein the antisense region comprises a nucleotide sequence that is complementary to a nucleotide sequence or a portion thereof of RNA encoded by the MAP kinase gene and the sense region comprises a nucleotide sequence that is complementary to the antisense region, and wherein the purine nucleotides present in the antisense region comprise 2′-deoxy-purine nucleotides. In another embodiment, the purine nucleotides present in the antisense region comprise 2′-O-methyl purine nucleotides. In either of the above embodiments, the antisense region comprises a phosphorothioate internucleotide linkage at the 3′ end of the antisense region. In an alternative embodiment, the antisense region comprises a glyceryl modification at the 3′ end of the antisense region. In another embodiment of any of the above described siNA molecules, any nucleotides present in a non-complementary region of the antisense strand (e.g. overhang region) are 2′-deoxy nucleotides.

[0043] In one embodiment, the invention features a double-stranded short interfering nucleic acid (siNA) molecule that down-regulates expression of a MAP kinase gene, wherein the siNA molecule is assembled from two separate oligonucleotide fragments each comprising 21 nucleotides, wherein one fragment comprises the sense region and the second fragment comprises the antisense region of the siNA molecule, and wherein about 19 nucleotides of each fragment of the siNA molecule are base-paired to the complementary nucleotides of the other fragment of the siNA molecule and wherein at least two 3′ terminal nucleotides of each fragment of the siNA molecule are not base-paired to the nucleotides of the other fragment of the siNA molecule. In one embodiment, each of the two 3′ terminal nucleotides of each fragment of the siNA molecule is a 2′-deoxy-pyrimidine, such as 2′-deoxy-thymidine. In another embodiment, all 21 nucleotides of each fragment of the siNA molecule are base-paired to the complementary nucleotides of the other fragment of the siNA molecule. In another embodiment, about 19 nucleotides of the antisense region are base-paired to the nucleotide sequence or a portion thereof of the RNA encoded by the MAP kinase gene. In another embodiment, 21 nucleotides of the antisense region are base-paired to the nucleotide sequence or a portion thereof of the RNA encoded by the MAP kinase gene. In any of the above embodiments, the 5′-end of the fragment comprising said antisense region can optionally include a phosphate group.

[0044] In one embodiment, the invention features a double-stranded short interfering nucleic acid (siNA) molecule that inhibits the expression of a MAP kinase RNA sequence (e.g., wherein said target RNA sequence is encoded by a MAP kinase gene or a gene involved in the MAP kinase pathway), wherein the siNA molecule does not contain any ribonucleotides and wherein each strand of the double-stranded siNA molecule is about 21 nucleotides long.

[0045] In one embodiment, the invention features a medicament comprising a siNA molecule of the invention.

[0046] In one embodiment, the invention features an active ingredient comprising a siNA molecule of the invention.

[0047] In one embodiment, the invention features the use of a double-stranded short interfering nucleic acid (siNA) molecule to down-regulate expression of a MAP kinase gene, wherein the siNA molecule comprises one or more chemical modifications and each strand of the double-stranded siNA is about 21 nucleotides long.

[0048] The invention features a double-stranded short interfering nucleic acid (siNA) molecule that inhibits expression of a MAP kinase gene, wherein one of the strands of the double-stranded siNA molecule is an antisense strand which comprises nucleotide sequence that is complementary to nucleotide sequence of a MAP kinase RNA or a portion thereof, the other strand is a sense strand which comprises nucleotide sequence that is complementary to a nucleotide sequence of the antisense strand and wherein a majority of the pyrimidine nucleotides present in the double-stranded siNA molecule comprises a sugar modification. In one embodiment, the nucleotide sequence of the antisense strand of the double-stranded siNA molecule is complementary to the nucleotide sequence of the MAP kinase RNA which encodes a protein or a portion thereof. In one embodiment, each strand of the siNA molecule comprises about 19 to about 29 nucleotides, and each strand comprises at least about 19 nucleotides that are complementary to the nucleotides of the other strand. In one embodiment, the siNA molecule is assembled from two oligonucleotide fragments, wherein one fragment comprises the nucleotide sequence of the antisense strand of the siNA molecule and a second fragment comprises nucleotide sequence of the sense region of the siNA molecule. In another embodiment, the sense strand is connected to the antisense strand via a linker molecule, such as a polynucleotide linker or a non-nucleotide linker. In one embodiment, the pyrimidine nucleotides present in the sense strand are 2′-deoxy-2′ -fluoro pyrimidine nucleotides and the purine nucleotides present in the sense region are 2′ -deoxy purine nucleotides. In another embodiment, the pyrimidine nucleotides present in the sense strand are 2′-deoxy-2′-fluoro pyrimidine nucleotides and the purine nucleotides present in the sense region are 2′-O-methyl purine nucleotides. In one embodiment, wherein the sense strand comprises a 3′-end and a 5′-end, a terminal cap moiety (e.g., an inverted deoxy abasic moiety) is present at the 5′-end, the 3′-end, or both of the 5′ and 3′ ends of the sense strand. In one embodiment, the antisense strand comprises one or more 2′-deoxy-2′-fluoro pyrimidine nucleotides and one or more 2′-O-methyl purine nucleotides. In one embodiment, the pyrimidine nucleotides present in the antisense strand are 2′-deoxy-2′-fluoro pyrimidine nucleotides and any purine nucleotides present in the antisense strand are 2′-O-methyl purine nucleotides. In one embodiment, the antisense strand comprises a phosphorothioate internucleotide linkage at the 3′ end of the antisense strand. In another embodiment, the antisense strand comprises a glyceryl modification at the 3′ end. In another embodiment, the 5′-end of the antisense strand optionally includes a phosphate group. In one embodiment, the invention features a double-stranded short interfering nucleic acid (siNA) molecule that down-regulates expression of a MAP kinase gene, wherein one of the strands of the double-stranded siNA molecule is an antisense strand which comprises nucleotide sequence that is complementary to nucleotide sequence of MAP kinase RNA or a portion thereof, the other strand is a sense strand which comprises nucleotide sequence that is complementary to a nucleotide sequence of the antisense strand and wherein a majority of the pyrimidine nucleotides present in the double-stranded siNA molecule comprises a sugar modification, and wherein the nucleotide sequence of the antisense strand is complementary to a nucleotide sequence of the 5′-untranslated region or a portion thereof of the MAP kinase RNA. In another embodiment, the nucleotide sequence of the antisense strand is complementary to a nucleotide sequence of the MAP kinase RNA or a portion thereof.

[0049] In one embodiment, the invention features a double-stranded short interfering nucleic acid (siNA) molecule that inhibits expression of a MAP kinase gene, wherein one of the strands of the double-stranded siNA molecule is an antisense strand which comprises nucleotide sequence that is complementary to nucleotide sequence of MAP kinase RNA or a portion thereof, the other strand is a sense strand which comprises nucleotide sequence that is complementary to a nucleotide sequence of the antisense strand and wherein a majority of the pyrimidine nucleotides present in the double-stranded siNA molecule comprises a sugar modification, and wherein each of the two strands of the siNA molecule comprises 21 nucleotides. In one embodiment, about 19 nucleotides of each strand of the siNA molecule are base-paired to the complementary nucleotides of the other strand of the siNA molecule and at least two 3′ terminal nucleotides of each strand of the siNA molecule are not base-paired to the nucleotides of the other strand of the siNA molecule. In one embodiment, each of the two 3′ terminal nucleotides of each fragment of the siNA molecule are 2′-deoxy-pyrimidines, such as 2′-deoxy-thymidine. In another embodiment, each strand of the siNA molecule is base-paired to the complementary nucleotides of the other strand of the siNA molecule. In one embodiment, about 19 nucleotides of the antisense strand are base-paired to the nucleotide sequence of the MAP kinase RNA or a portion thereof. In another embodiment, 21 nucleotides of the antisense strand are base-paired to the nucleotide sequence of the MAP kinase RNA or a portion thereof.

[0050] In one embodiment, the invention features a composition comprising a siNA molecule of the invention and a pharmaceutically acceptable carrier or diluent.

[0051] In one embodiment, the invention features the use of a double-stranded short interfering nucleic acid (siNA) molecule that inhibits expression of a MAP kinase gene, wherein one of the strands of the double-stranded siNA molecule is an antisense strand which comprises nucleotide sequence that is complementary to nucleotide sequence of MAP kinase RNA or a portion thereof, the other strand is a sense strand which comprises nucleotide sequence that is complementary to a nucleotide sequence of the antisense strand and wherein a majority of the pyrimidine nucleotides present in the double-stranded siNA molecule comprises a sugar modification.

[0052] In a non-limiting example, the introduction of chemically-modified nucleotides into nucleic acid molecules provides a powerful tool in overcoming potential limitations of in vivo stability and bioavailability inherent to native RNA molecules that are delivered exogenously. For example, the use of chemically-modified nucleic acid molecules can enable a lower dose of a particular nucleic acid molecule for a given therapeutic effect since chemically-modified nucleic acid molecules tend to have a longer half-life in serum. Furthermore, certain chemical modifications can improve the bioavailability of nucleic acid molecules by targeting particular cells or tissues and/or improving cellular uptake of the nucleic acid molecule. Therefore, even if the activity of a chemically-modified nucleic acid molecule is reduced as compared to a native nucleic acid molecule, for example, when compared to an all-RNA nucleic acid molecule, the overall activity of the modified nucleic acid molecule can be greater than that of the native molecule due to improved stability and/or delivery of the molecule. Unlike native unmodified siNA, chemically-modified siNA can also minimize the possibility of activating interferon activity in humans.

[0053] In any of the embodiments of siNA molecules described herein, the antisense region of a siNA molecule of the invention can comprise a phosphorothioate internucleotide linkage at the 3′-end of said antisense region. In any of the embodiments of siNA molecules described herein, the antisense region can comprise about one to about five phosphorothioate internucleotide linkages at the 5′-end of said antisense region. In any of the embodiments of siNA molecules described herein, the 3′-terminal nucleotide overhangs of a siNA molecule of the invention can comprise ribonucleotides or deoxyribonucleotides that are chemically-modified at a nucleic acid sugar, base, or backbone. In any of the embodiments of siNA molecules described herein, the 3′-terminal nucleotide overhangs can comprise one or more universal base ribonucleotides. In any of the embodiments of siNA molecules described herein, the 3′-terminal nucleotide overhangs can comprise one or more acyclic nucleotides.

[0054] One embodiment of the invention provides an expression vector comprising a nucleic acid sequence encoding at least one siNA molecule of the invention in a manner that allows expression of the nucleic acid molecule. Another embodiment of the invention provides a mammalian cell comprising such an expression vector. The mammalian cell can be a human cell. The siNA molecule of the expression vector can comprise a sense region and an antisense region. The antisense region can comprise sequence complementary to an RNA or DNA sequence encoding MAP kinase and the sense region can comprise sequence complementary to the antisense region. The siNA molecule can comprise two distinct strands having complementary sense and antisense regions. The siNA molecule can comprise a single strand having complementary sense and antisense regions.

[0055] In one embodiment, the invention features a chemically-modified short interfering nucleic acid (siNA) molecule capable of mediating RNA interference (RNAi) against a MAP kinase inside a cell or reconstituted in vitro system, wherein the chemical modification comprises one or more (e.g., about 1, 2, 3, 4, 5, 6, 7, 8, 9, 10, or more) nucleotides comprising a backbone modified internucleotide linkage having Formula I: [chemical structure]
[0056] wherein each R1 and R2 is independently any nucleotide, non-nucleotide, or polynucleotide which can be naturally-occurring or chemically-modified, each X and Y is independently O, S, N, alkyl, or substituted alkyl, each Z and W is independently O, S, N, alkyl, substituted alkyl, O-alkyl, S-alkyl, alkaryl, or aralkyl, and wherein W, X, Y, and Z are optionally not all O.

[0057] The chemically-modified internucleotide linkages having Formula I, for example, wherein any Z, W, X, and/or Y independently comprises a sulphur atom, can be present in one or both oligonucleotide strands of the siNA duplex, for example, in the sense strand, the antisense strand, or both strands. The siNA molecules of the invention can comprise one or more (e.g., about 1, 2, 3, 4, 5, 6, 7, 8, 9, 10, or more) chemically-modified internucleotide linkages having Formula I at the 3′-end, the 5′-end, or both of the 3′ and 5′-ends of the sense strand, the antisense strand, or both strands. For example, an exemplary siNA molecule of the invention can comprise about 1 to about 5 or more (e.g., about 1, 2, 3, 4, 5, or more) chemically-modified internucleotide linkages having Formula I at the 5′-end of the sense strand, the antisense strand, or both strands. In another non-limiting example, an exemplary siNA molecule of the invention can comprise one or more (e.g., about 1, 2, 3, 4, 5, 6, 7, 8, 9, 10, or more) pyrimidine nucleotides with chemically-modified internucleotide linkages having Formula I in the sense strand, the antisense strand, or both strands. In yet another non-limiting example, an exemplary siNA molecule of the invention can comprise one or more (e.g., about 1, 2, 3, 4, 5, 6, 7, 8, 9, 10, or more) purine nucleotides with chemically-modified internucleotide linkages having Formula I in the sense strand, the antisense strand, or both strands. In another embodiment, a siNA molecule of the invention having internucleotide linkage(s) of Formula I also comprises a chemically-modified nucleotide or non-nucleotide having any of Formulae I-VII.

[0058] In one embodiment, the invention features a chemically-modified short interfering nucleic acid (siNA) molecule capable of mediating RNA interference (RNAi) against a MAP kinase inside a cell or reconstituted in vitro system, wherein the chemical modification comprises one or more (e.g., about 1, 2, 3, 4, 5, 6, 7, 8, 9, 10, or more) nucleotides or non-nucleotides having Formula II: [chemical structure]
wherein each R3, R4, R5, R6, R7, R8, R10, R11 and R12 is independently H, OH, alkyl, substituted alkyl, alkaryl or aralkyl, F, Cl, Br, CN, CF3, OCF3, OCN, O-alkyl, S-alkyl, N-alkyl, O-alkenyl, S-alkenyl, N-alkenyl, SO-alkyl, alkyl-OSH, alkyl-OH, O-alkyl-OH, O-alkyl-SH, S-alkyl-OH, S-alkyl-SH, alkyl-S-alkyl, alkyl-O-alkyl, ONO2, NO2, N3, NH2, aminoalkyl, aminoacid, aminoacyl, ONH2, O-aminoalkyl, O-aminoacid, O-aminoacyl, heterocycloalkyl, heterocycloalkaryl, aminoalkylamino, polyalklylamino, substituted silyl, or group having Formula I; R9 is O, S, CH2, S═O, CHF, or CF2, and B is a nucleosidic base such as adenine, guanine, uracil, cytosine, thymine, 2-aminoadenosine, 5-methylcytosine, 2,6-diaminopurine, or any other non-naturally occurring base that can be complementary or non-complementary to target RNA or a non-nucleosidic base such as phenyl, naphthyl, 3-nitropyrrole, 5-nitroindole, nebularine, pyridone, pyridinone, or any other non-naturally occurring universal base that can be complementary or non-complementary to target RNA.

[0059] The chemically-modified nucleotide or non-nucleotide of Formula II can be present in one or both oligonucleotide strands of the siNA duplex, for example in the sense strand, the antisense strand, or both strands. The siNA molecules of the invention can comprise one or more chemically-modified nucleotide or non-nucleotide of Formula II at the 3′-end, the 5′-end, or both of the 3′ and 5′-ends of the sense strand, the antisense strand, or both strands. For example, an exemplary siNA molecule of the invention can comprise about 1 to about 5 or more (e.g., about 1, 2, 3, 4, 5, or more) chemically-modified nucleotides or non-nucleotides of Formula II at the 5′-end of the sense strand, the antisense strand, or both strands. In anther non-limiting example, an exemplary siNA molecule of the invention can comprise about 1 to about 5 or more (e.g., about 1, 2, 3, 4, 5, or more) chemically-modified nucleotides or non-nucleotides of Formula II at the 3′-end of the sense strand, the antisense strand, or both strands.

[0060] In one embodiment, the invention features a chemically-modified short interfering nucleic acid (siNA) molecule capable of mediating RNA interference (RNAi) against a MAP kinase inside a cell or reconstituted in vitro system, wherein the chemical modification comprises one or more (e.g., about 1, 2, 3, 4, 5, 6, 7, 8, 9, 10, or more) nucleotides or non-nucleotides having Formula III: [chemical structure]
wherein each R3, R4, R5, R6, R7, R8, R10, R11 and R12 is independently H, OH, alkyl, substituted alkyl, alkaryl or aralkyl, F, Cl, Br, CN, CF3, OCF3, OCN, O-alkyl, S-alkyl, N-alkyl, O-alkenyl, S-alkenyl, N-alkenyl, SO-alkyl, alkyl-OSH, alkyl-OH, O-alkyl-OH, O-alkyl-SH, S-alkyl-OH, S-alkyl-SH, alkyl-S-alkyl, alkyl-O-alkyl, ONO2, NO2, N3, NH2, aminoalkyl, aminoacid, aminoacyl, ONH2, O-aminoalkyl, O-aminoacid, O-aminoacyl, heterocycloalkyl, heterocycloalkaryl, aminoalkylamino, polyalklylamino, substituted silyl, or group having Formula I; R9 is O, S, CH2, S═O, CHF, or CF2, and B is a nucleosidic base such as adenine, guanine, uracil, cytosine, thymine, 2-aminoadenosine, 5-methylcytosine, 2,6-diaminopurine, or any other non-naturally occurring base that can be employed to be complementary or non-complementary to target RNA or a non-nucleosidic base such as phenyl, naphthyl, 3-nitropyrrole, 5-nitroindole, nebularine, pyridone, pyridinone, or any other non-naturally occurring universal base that can be complementary or non-complementary to target RNA.

[0061] The chemically-modified nucleotide or non-nucleotide of Formula III can be present in one or both oligonucleotide strands of the siNA duplex, for example, in the sense strand, the antisense strand, or both strands. The siNA molecules of the invention can comprise one or more chemically-modified nucleotide or non-nucleotide of Formula III at the 3′-end, the 5′-end, or both of the 3′ and 5′-ends of the sense strand, the antisense strand, or both strands. For example, an exemplary siNA molecule of the invention can comprise about 1 to about 5 or more (e.g., about 1, 2, 3, 4, 5, or more) chemically-modified nucleotide(s) or non-nucleotide(s) of Formula III at the 5′-end of the sense strand, the antisense strand, or both strands. In anther non-limiting example, an exemplary siNA molecule of the invention can comprise about 1 to about 5 or more (e.g., about 1, 2, 3, 4, 5, or more) chemically-modified nucleotide or non-nucleotide of Formula III at the 3′-end of the sense strand, the antisense strand, or both strands.

[0062] In another embodiment, a siNA molecule of the invention comprises a nucleotide having Formula II or III, wherein the nucleotide having Formula II or III is in an inverted configuration. For example, the nucleotide having Formula II or III is connected to the siNA construct in a 3′-3′, 3′-2′, 2′-3′, or 5′-5′ configuration, such as at the 3′-end, the 5′-end, or both of the 3′ and 5′-ends of one or both siNA strands.

[0063] In one embodiment, the invention features a chemically-modified short interfering nucleic acid (siNA) molecule capable of mediating RNA interference (RNAi) against a MAP kinase inside a cell or reconstituted in vitro system, wherein the chemical modification comprises a 5′-terminal phosphate group having Formula IV: [chemical structure]
wherein each X and Y is independently O, S, N, alkyl, substituted alkyl, or alkylhalo; wherein each Z and W is independently O, S, N, alkyl, substituted alkyl, O-alkyl, S-alkyl, alkaryl, aralkyl, or alkylhalo; and wherein W, X, Y and Z are not all O.

[0064] In one embodiment, the invention features a siNA molecule having a 5′-terminal phosphate group having Formula IV on the target-complementary strand, for example, a strand complementary to a target RNA, wherein the siNA molecule comprises an all RNA siNA molecule. In another embodiment, the invention features a siNA molecule having a 5′-terminal phosphate group having Formula IV on the target-complementary strand wherein the siNA molecule also comprises about 1 to about 3 (e.g., about 1, 2, or 3) nucleotide 3′-terminal nucleotide overhangs having about 1 to about 4 (e.g., about 1, 2, 3, or 4) deoxyribonucleotides on the 3′-end of one or both strands. In another embodiment, a 5′-terminal phosphate group having Formula IV is present on the target-complementary strand of a siNA molecule of the invention, for example a siNA molecule having chemical modifications having any of Formulae I-VII.

[0065] In one embodiment, the invention features a chemically-modified short interfering nucleic acid (siNA) molecule capable of mediating RNA interference (RNAi) against a MAP kinase inside a cell or reconstituted in vitro system, wherein the chemical modification comprises one or more phosphorothioate internucleotide linkages. For example, in a non-limiting example, the invention features a chemically-modified short interfering nucleic acid (siNA) having about 1, 2, 3, 4, 5, 6, 7, 8 or more phosphorothioate internucleotide linkages in one siNA strand. In yet another embodiment, the invention features a chemically-modified short interfering nucleic acid (siNA) individually having about 1, 2, 3, 4, 5, 6, 7, 8 or more phosphorothioate internucleotide linkages in both siNA strands. The phosphorothioate internucleotide linkages can be present in one or both oligonucleotide strands of the siNA duplex, for example in the sense strand, the antisense strand, or both strands. The siNA molecules of the invention can comprise one or more phosphorothioate internucleotide linkages at the 3′-end, the 5′-end, or both of the 3′- and 5′-ends of the sense strand, the antisense strand, or both strands. For example, an exemplary siNA molecule of the invention can comprise about 1 to about 5 or more (e.g., about 1, 2, 3, 4, 5, or more) consecutive phosphorothioate internucleotide linkages at the 5′-end of the sense strand, the antisense strand, or both strands. In another non-limiting example, an exemplary siNA molecule of the invention can comprise one or more (e.g., about 1, 2, 3, 4, 5, 6, 7, 8, 9, 10, or more) pyrimidine phosphorothioate internucleotide linkages in the sense strand, the antisense strand, or both strands. In yet another non-limiting example, an exemplary siNA molecule of the invention can comprise one or more (e.g., about 1, 2, 3, 4, 5, 6, 7, 8, 9, 10, or more) purine phosphorothioate internucleotide linkages in the sense strand, the antisense strand, or both strands.

[0066] In one embodiment, the invention features a siNA molecule, wherein the sense strand comprises one or more, for example, about 1, 2, 3, 4, 5, 6, 7, 8, 9, 10, or more phosphorothioate internucleotide linkages, and/or one or more (e.g., about 1, 2, 3, 4, 5, 6, 7, 8, 9, 10 or more) 2′-deoxy, 2′-O-methyl, 2′-deoxy-2′-fluoro, and/or about one or more (e.g., about 1, 2, 3, 4, 5, 6, 7, 8, 9, 10 or more) universal base modified nucleotides, and optionally a terminal cap molecule at the 3′-end, the 5′-end, or both of the 3′- and 5′-ends of the sense strand; and wherein the antisense strand comprises about 1 to about 10 or more, specifically about 1, 2, 3, 4, 5, 6, 7, 8, 9, 10, or more phosphorothioate internucleotide linkages, and/or one or more (e.g., about 1, 2, 3, 4, 5, 6, 7, 8, 9, 10 or more) 2′-deoxy, 2′-O-methyl, 2′-deoxy-2′-fluoro, and/or one or more (e.g., about 1, 2, 3, 4, 5, 6, 7, 8, 9, 10 or more) universal base modified nucleotides, and optionally a terminal cap molecule at the 3′-end, the 5′-end, or both of the 3′- and 5′-ends of the antisense strand. In another embodiment, one or more, for example about 1, 2, 3, 4, 5, 6, 7, 8, 9, 10, or more, pyrimidine nucleotides of the sense and/or antisense siNA strand are chemically-modified with 2′-deoxy, 2′-O-methyl and/or 2′-deoxy-2′-fluoro nucleotides, with or without one or more, for example about 1, 2, 3, 4, 5, 6, 7, 8, 9, 10, or more, phosphorothioate internucleotide linkages and/or a terminal cap molecule at the 3′-end, the 5′-end, or both of the 3′- and 5′-ends, being present in the same or different strand.

[0067] In another embodiment, the invention features a siNA molecule, wherein the sense strand comprises about 1 to about 5, specifically about 1, 2, 3, 4, or 5 phosphorothioate internucleotide linkages, and/or one or more (e.g., about 1, 2, 3, 4, 5, or more) 2′-deoxy, 2′-O-methyl, 2′-deoxy-2′-fluoro, and/or one or more (e.g., about 1, 2, 3, 4, 5, or more) universal base modified nucleotides, and optionally a terminal cap molecule at the 3-end, the 5′-end, or both of the 3′- and 5′-ends of the sense strand; and wherein the antisense strand comprises about 1 to about 5 or more, specifically about 1, 2, 3, 4, 5, or more phosphorothioate internucleotide linkages, and/or one or more (e.g., about 1, 2, 3, 4, 5, 6, 7, 8, 9, 10 or more) 2′-deoxy, 2′-O-methyl, 2′-deoxy-2′-fluoro, and/or one or more (e.g., about 1, 2, 3, 4, 5, 6, 7, 8, 9, 10 or more) universal base modified nucleotides, and optionally a terminal cap molecule at the 3′-end, the 5′-end, or both of the 3′- and 5′-ends of the antisense strand. In another embodiment, one or more, for example about 1, 2, 3, 4, 5, 6, 7, 8, 9, 10, or more, pyrimidine nucleotides of the sense and/or antisense siNA strand are chemically-modified with 2′-deoxy, 2′-O-methyl and/or 2′-deoxy-2′-fluoro nucleotides, with or without about 1 to about 5 or more, for example about 1, 2, 3, 4, 5, or more phosphorothioate internucleotide linkages and/or a terminal cap molecule at the 3′-end, the 5′-end, or both of the 3′- and 5′-ends, being present in the same or different strand.

[0068] In one embodiment, the invention features a siNA molecule, wherein the antisense strand comprises one or more, for example, about 1, 2, 3, 4, 5, 6, 7, 8, 9, 10, or more phosphorothioate internucleotide linkages, and/or about one or more (e.g., about 1, 2, 3, 4, 5, 6, 7, 8, 9, 10 or more) 2′-deoxy, 2′-O-methyl, 2′-deoxy-2′-fluoro, and/or one or more (e.g., about 1, 2, 3, 4, 5, 6, 7, 8, 9, 10 or more) universal base modified nucleotides, and optionally a terminal cap molecule at the 3′-end, the 5′-end, or both of the 3′- and 5′-ends of the sense strand; and wherein the antisense strand comprises about 1 to about 10 or more, specifically about 1, 2, 3, 4, 5, 6, 7, 8, 9, 10 or more phosphorothioate internucleotide linkages, and/or one or more (e.g., about 1, 2, 3, 4, 5, 6, 7, 8, 9, 10 or more) 2′-deoxy, 2′-O-methyl, 2′-deoxy-2′-fluoro, and/or one or more (e.g., about 1, 2, 3, 4, 5, 6, 7, 8, 9, 10 or more) universal base modified nucleotides, and optionally a terminal cap molecule at the 3′-end, the 5′-end, or both of the 3′- and 5′-ends of the antisense strand. In another embodiment, one or more, for example about 1, 2, 3, 4, 5, 6, 7, 8, 9, 10 or more pyrimidine nucleotides of the sense and/or antisense siNA strand are chemically-modified with 2′-deoxy, 2′-O-methyl and/or 2′-deoxy-2′-fluoro nucleotides, with or without one or more, for example, about 1, 2, 3, 4, 5, 6, 7, 8, 9, 10 or more phosphorothioate internucleotide linkages and/or a terminal cap molecule at the 3′-end, the 5′-end, or both of the 3′ and 5′-ends, being present in the same or different strand.

[0069] In another embodiment, the invention features a siNA molecule, wherein the antisense strand comprises about 1 to about 5 or more, specifically about 1, 2, 3, 4, 5 or more phosphorothioate internucleotide linkages, and/or one or more (e.g., about 1, 2, 3, 4, 5, 6, 7, 8, 9, 10 or more) 2′-deoxy, 2′-O-methyl, 2′-deoxy-2′-fluoro, and/or one or more (e.g., about 1, 2, 3, 4, 5, 6, 7, 8, 9, 10 or more) universal base modified nucleotides, and optionally a terminal cap molecule at the 3′-end, the 5′-end, or both of the 3′- and 5′-ends of the sense strand; and wherein the antisense strand comprises about 1 to about 5 or more, specifically about 1, 2, 3, 4, 5 or more phosphorothioate internucleotide linkages, and/or one or more (e.g., about 1, 2, 3, 4, 5, 6, 7, 8, 9, 10 or more) 2′-deoxy, 2′-O-methyl, 2′-deoxy-2′-fluoro, and/or one or more (e.g., about 1, 2, 3, 4, 5, 6, 7, 8, 9, 10 or more) universal base modified nucleotides, and optionally a terminal cap molecule at the 3′-end, the 5′-end, or both of the 3′- and 5′-ends of the antisense strand. In another embodiment, one or more, for example about 1, 2, 3, 4, 5, 6, 7, 8, 9, 10 or more pyrimidine nucleotides of the sense and/or antisense siNA strand are chemically-modified with 2′-deoxy, 2′-O-methyl and/or 2′-deoxy-2′-fluoro nucleotides, with or without about 1 to about 5, for example about 1, 2, 3, 4, 5 or more phosphorothioate internucleotide linkages and/or a terminal cap molecule at the 3′-end, the 5′-end, or both of the 3′- and 5′-ends, being present in the same or different strand.

[0070] In one embodiment, the invention features a chemically-modified short interfering nucleic acid (siNA) molecule having about 1 to about 5, specifically about 1, 2, 3, 4, 5 or more phosphorothioate internucleotide linkages in each strand of the siNA molecule.

[0071] In another embodiment, the invention features a siNA molecule comprising 2′-5′ internucleotide linkages. The 2′-5′ internucleotide linkage(s) can be at the 3′-end, the 5′-end, or both of the 3′- and 5′-ends of one or both siNA sequence strands. In addition, the 2′-5′ internucleotide linkage(s) can be present at various other positions within one or both siNA sequence strands, for example, about 1, 2, 3, 4, 5, 6, 7, 8, 9, 10, or more including every internucleotide linkage of a pyrimidine nucleotide in one or both strands of the siNA molecule can comprise a 2′-5′ internucleotide linkage, or about 1, 2, 3, 4, 5, 6, 7, 8, 9, 10, or more including every internucleotide linkage of a purine nucleotide in one or both strands of the siNA molecule can comprise a 2′-5′ internucleotide linkage.

[0072] In another embodiment, a chemically-modified siNA molecule of the invention comprises a duplex having two strands, one or both of which can be chemically-modified, wherein each strand is about 18 to about 27 (e.g., about 18, 19, 20, 21, 22, 23, 24, 25, 26, or 27) nucleotides in length, wherein the duplex has about 18 to about 23 (e.g., about 18, 19, 20, 21, 22, or 23) base pairs, and wherein the chemical modification comprises a structure having any of Formulae I-VII. For example, an exemplary chemically-modified siNA molecule of the invention comprises a duplex having two strands, one or both of which can be chemically-modified with a chemical modification having any of Formulae I-VII or any combination thereof, wherein each strand consists of about 21 nucleotides, each having a 2-nucleotide 3′-terminal nucleotide overhang, and wherein the duplex has about 19 base pairs. In another embodiment, a siNA molecule of the invention comprises a single stranded hairpin structure, wherein the siNA is about 36 to about 70 (e.g., about 36, 40, 45, 50, 55, 60, 65, or 70) nucleotides in length having about 18 to about 23 (e.g., about 18, 19, 20, 21, 22, or 23) base pairs, and wherein the siNA can include a chemical modification comprising a structure having any of Formulae I-VII or any combination thereof. For example, an exemplary chemically-modified siNA molecule of the invention comprises a linear oligonucleotide having about 42 to about 50 (e.g., about 42, 43, 44, 45, 46, 47, 48, 49, or 50) nucleotides that is chemically-modified with a chemical modification having any of Formulae I-VII or any combination thereof, wherein the linear oligonucleotide forms a hairpin structure having about 19 base pairs and a 2-nucleotide 3′-terminal nucleotide overhang. In another embodiment, a linear hairpin siNA molecule of the invention contains a stem loop motif, wherein the loop portion of the siNA molecule is biodegradable. For example, a linear hairpin siNA molecule of the invention is designed such that degradation of the loop portion of the siNA molecule in vivo can generate a double-stranded siNA molecule with 3′-terminal overhangs, such as 3′-terminal nucleotide overhangs comprising about 2 nucleotides.

[0073] In another embodiment, a siNA molecule of the invention comprises a circular nucleic acid molecule, wherein the siNA is about 38 to about 70 (e.g., about 38, 40, 45, 50, 55, 60, 65, or 70) nucleotides in length having about 18 to about 23 (e.g., about 18, 19, 20, 21, 22, or 23) base pairs, and wherein the siNA can include a chemical modification, which comprises a structure having any of Formulae I-VII or any combination thereof For example, an exemplary chemically-modified siNA molecule of the invention comprises a circular oligonucleotide having about 42 to about 50 (e.g., about 42, 43, 44, 45, 46, 47, 48, 49, or 50) nucleotides that is chemically-modified with a chemical modification having any of Formulae I-VII or any combination thereof, wherein the circular oligonucleotide forms a dumbbell shaped structure having about 19 base pairs and 2 loops.

[0074] In another embodiment, a circular siNA molecule of the invention contains two loop motifs, wherein one or both loop portions of the siNA molecule is biodegradable. For example, a circular siNA molecule of the invention is designed such that degradation of the loop portions of the siNA molecule in vivo can generate a double-stranded siNA molecule with 3′-terminal overhangs, such as 3′-terminal nucleotide overhangs comprising about 2 nucleotides.

[0075] In one embodiment, a siNA molecule of the invention comprises at least one (e.g., about 1, 2, 3, 4, 5, 6, 7, 8, 9, 10, or more) abasic moiety, for example a compound having Formula V: [chemical structure]
wherein each R3, R4, R5, R6, R7, R8, R10, R11, R12, and R13 is independently H, OH, alkyl, substituted alkyl, alkaryl or aralkyl, F, Cl, Br, CN, CF3, OCF3, OCN, O-alkyl, S-alkyl, N-alkyl, O-alkenyl, S-alkenyl, N-alkenyl, SO-alkyl, alkyl-OSH, alkyl-OH, O-alkyl-OH, O-alkyl-SH, S-alkyl-OH, S-alkyl-SH, alkyl-S-alkyl, alkyl-O-alkyl, ONO2, NO2, N3, NH2, aminoalkyl, aminoacid, aminoacyl, ONH2, O-aminoalkyl, O-aminoacid, O-aminoacyl, heterocycloalkyl, heterocycloalkaryl, aminoalkylamino, polyalklylamino, substituted silyl, or group having Formula I; R9 is O, S, CH2, S═O, CHF, or CF2.

[0076] In one embodiment, a siNA molecule of the invention comprises at least one (e.g., about 1, 2, 3, 4, 5, 6, 7, 8, 9, 10, or more) inverted abasic moiety, for example a compound having Formula VI: [chemical structure]
wherein each R3, R4, R5, R6, R7, R8, R10, R11, R12, and R13 is independently H, OH, alkyl, substituted alkyl, alkaryl or aralkyl, F, Cl, Br, CN, CF3, OCF3, OCN, O-alkyl, S-alkyl, N-alkyl, O-alkenyl, S-alkenyl, N-alkenyl, SO-alkyl, alkyl-OSH, alkyl-OH, O-alkyl-OH, O-alkyl-SH, S-alkyl-OH, S-alkyl-SH, alkyl-S-alkyl, alkyl-O-alkyl, ONO2, NO2, N3, NH2, aminoalkyl, aminoacid, aminoacyl, ONH2, O-aminoalkyl, O-aminoacid, O-aminoacyl, heterocycloalkyl, heterocycloalkaryl, aminoalkylamino, polyalklylamino, substituted silyl, or group having Formula I; R9 is O, S, CH2, S═O, CHF, or CF2, and either R2, R3, R8 or R13 serve as points of attachment to the siNA molecule of the invention.

[0077] In another embodiment, a siNA molecule of the invention comprises at least one (e.g., about 1, 2, 3, 4, 5, 6, 7, 8, 9, 10, or more) substituted polyalkyl moieties, for example a compound having Formula VII: [chemical structure]
wherein each n is independently an integer from 1 to 12, each R1, R2 and R3 is independently H, OH, alkyl, substituted alkyl, alkaryl or aralkyl, F, Cl, Br, CN, CF3, OCF3, OCN, O-alkyl, S-alkyl, N-alkyl, O-alkenyl, S-alkenyl, N-alkenyl, SO-alkyl, alkyl-OSH, alkyl-OH, O-alkyl-OH, O-alkyl-SH, S-alkyl-OH, S-alkyl-SH, alkyl-S-alkyl, alkyl-O-alkyl, ONO2, NO2, N3, NH2, aminoalkyl, aminoacid, aminoacyl, ONH2, O-aminoalkyl, O-aminoacid, O-aminoacyl, heterocycloalkyl, heterocycloalkaryl, aminoalkylamino, polyalklylamino, substituted silyl, or a group having Formula I, and R1, R2 or R3 serves as points of attachment to the siNA molecule of the invention.

[0078] In another embodiment, the invention features a compound having Formula VII, wherein R1 and R2 are hydroxyl (OH) groups, n=1, and R3 comprises 0 and is the point of attachment to the 3′-end, the 5′-end, or both of the 3′ and 5′-ends of one or both strands of a double-stranded siNA molecule of the invention or to a single-stranded siNA molecule of the invention. This modification is referred to herein as “glyceryl” (for example modification 6 in FIG. 10).

[0079] In another embodiment, a moiety having any of Formula V, VI or VII of the invention is at the 3′-end, the 5′-end, or both of the 3′ and 5′-ends of a siNA molecule of the invention. For example, a moiety having Formula V, VI or VII can be present at the 3′-end, the 5′-end, or both of the 3′ and 5′-ends of the antisense strand, the sense strand, or both antisense and sense strands of the siNA molecule. In addition, a moiety having Formula VII can be present at the 3′-end or the 5′-end of a hairpin siNA molecule as described herein.

[0080] In another embodiment, a siNA molecule of the invention comprises an abasic residue having Formula V or VI, wherein the abasic residue having Formula VI or VI is connected to the siNA construct in a 3′-3′, 3′-2′, 2′-3′, or 5′-5′ configuration, such as at the 3′-end, the 5′ -end, or both of the 3′ and 5′-ends of one or both siNA strands.

[0081] In one embodiment, a siNA molecule of the invention comprises one or more (e.g., about 1, 2, 3, 4, 5, 6, 7, 8, 9, 10, or more) locked nucleic acid (LNA) nucleotides, for example at the 5′-end, the 3′-end, both of the 5′ and 3′-ends, or any combination thereof, of the siNA molecule.

[0082] In another embodiment, a siNA molecule of the invention comprises one or more (e.g., about 1, 2, 3, 4, 5, 6, 7, 8, 9, 10, or more) acyclic nucleotides, for example at the 5′-end, the 3′-end, both of the 5′ and 3′-ends, or any combination thereof, of the siNA molecule.

[0083] In one embodiment, the invention features a chemically-modified short interfering nucleic acid (siNA) molecule of the invention, wherein the chemically-modified siNA comprises a sense region, where any (e.g., one or more or all) pyrimidine nucleotides present in the sense region are 2′-deoxy-2′-fluoro pyrimidine nucleotides (e.g., wherein all pyrimidine nucleotides are 2′-deoxy-2′-fluoro pyrimidine nucleotides or alternately a plurality of pyrimidine nucleotides are 2′-deoxy-2′-fluoro pyrimidine nucleotides), and where any (e.g., one or more or all) purine nucleotides present in the sense region are 2′-deoxy purine nucleotides (e.g., wherein all purine nucleotides are 2′-deoxy purine nucleotides or alternately a plurality of purine nucleotides are 2′-deoxy purine nucleotides).

[0084] In one embodiment, the invention features a chemically-modified short interfering nucleic acid (siNA) molecule of the invention, wherein the chemically-modified siNA comprises a sense region, where any (e.g., one or more or all) pyrimidine nucleotides present in the sense region are 2′-deoxy-2′-fluoro pyrimidine nucleotides (e.g., wherein all pyrimidine nucleotides are 2′-deoxy-2′-fluoro pyrimidine nucleotides or alternately a plurality of pyrimidine nucleotides are 2′-deoxy-2′-fluoro pyrimidine nucleotides), and where any (e.g., one or more or all) purine nucleotides present in the sense region are 2′-deoxy purine nucleotides (e.g., wherein all purine nucleotides are 2′-deoxy purine nucleotides or alternately a plurality of purine nucleotides are 2′-deoxy purine nucleotides), wherein any nucleotides comprising a 3′-terminal nucleotide overhang that are present in said sense region are 2′-deoxy nucleotides.

[0085] In one embodiment, the invention features a chemically-modified short interfering nucleic acid (siNA) molecule of the invention, wherein the chemically-modified siNA comprises a sense region, where any (e.g., one or more or all) pyrimidine nucleotides present in the sense region are 2′-deoxy-2′-fluoro pyrimidine nucleotides (e.g., wherein all pyrimidine nucleotides are 2′-deoxy-2′-fluoro pyrimidine nucleotides or alternately a plurality of pyrimidine nucleotides are 2′-deoxy-2′-fluoro pyrimidine nucleotides), and where any (e.g., one or more or all) purine nucleotides present in the sense region are 2′-O-methyl purine nucleotides (e.g., wherein all purine nucleotides are 2′-O-methyl purine nucleotides or alternately a plurality of purine nucleotides are 2′-O-methyl purine nucleotides).

[0086] In one embodiment, the invention features a chemically-modified short interfering nucleic acid (siNA) molecule of the invention, wherein the chemically-modified siNA comprises a sense region, where any (e.g., one or more or all) pyrimidine nucleotides present in the sense region are 2′-deoxy-2′-fluoro pyrimidine nucleotides (e.g., wherein all pyrimidine nucleotides are 2′-deoxy-2′-fluoro pyrimidine nucleotides or alternately a plurality of pyrimidine nucleotides are 2′-deoxy-2′-fluoro pyrimidine nucleotides), and where any (e.g., one or more or all) purine nucleotides present in the sense region are 2′-O-methyl purine nucleotides (e.g., wherein all purine nucleotides are 2′-O-methyl purine nucleotides or alternately a plurality of purine nucleotides are 2′-O-methyl purine nucleotides), wherein any nucleotides comprising a 3′-terminal nucleotide overhang that are present in said sense region are 2′-deoxy nucleotides.

[0087] In one embodiment, the invention features a chemically-modified short interfering nucleic acid (siNA) molecule of the invention, wherein the chemically-modified siNA comprises an antisense region, where any (e.g., one or more or all) pyrimidine nucleotides present in the antisense region are 2′-deoxy-2′-fluoro pyrimidine nucleotides (e.g., wherein all pyrimidine nucleotides are 2′-deoxy-2′-fluoro pyrimidine nucleotides or alternately a plurality of pyrimidine nucleotides are 2′-deoxy-2′-fluoro pyrimidine nucleotides), and wherein any (e.g., one or more or all) purine nucleotides present in the antisense region are 2′-O-methyl purine nucleotides (e.g., wherein all purine nucleotides are 2′-O-methyl purine nucleotides or alternately a plurality of purine nucleotides are 2′-O-methyl purine nucleotides).

[0088] In one embodiment, the invention features a chemically-modified short interfering nucleic acid (siNA) molecule of the invention, wherein the chemically-modified siNA comprises an antisense region, where any (e.g., one or more or all) pyrimidine nucleotides present in the antisense region are 2′-deoxy-2′-fluoro pyrimidine nucleotides (e.g., wherein all pyrimidine nucleotides are 2′-deoxy-2′-fluoro pyrimidine nucleotides or alternately a plurality of pyrimidine nucleotides are 2′-deoxy-2′-fluoro pyrimidine nucleotides), and wherein any (e.g., one or more or all) purine nucleotides present in the antisense region are 2′-O-methyl purine nucleotides (e.g., wherein all purine nucleotides are 2′-O-methyl purine nucleotides or alternately a plurality of purine nucleotides are 2′-O-methyl purine nucleotides), wherein any nucleotides comprising a 3′-terminal nucleotide overhang that are present in said antisense region are 2′-deoxy nucleotides.

[0089] In one embodiment, the invention features a chemically-modified short interfering nucleic acid (siNA) molecule of the invention, wherein the chemically-modified siNA comprises an antisense region, where any (e.g., one or more or all) pyrimidine nucleotides present in the antisense region are 2′-deoxy-2′-fluoro pyrimidine nucleotides (e.g., wherein all pyrimidine nucleotides are 2′-deoxy-2′-fluoro pyrimidine nucleotides or alternately a plurality of pyrimidine nucleotides are 2′-deoxy-2′-fluoro pyrimidine nucleotides), and where any (e.g., one or more or all) purine nucleotides present in the antisense region are 2′-deoxy purine nucleotides (e.g., wherein all purine nucleotides are 2′-deoxy purine nucleotides or alternately a plurality of purine nucleotides are 2′-deoxy purine nucleotides).

[0090] In one embodiment, the invention features a chemically-modified short interfering nucleic acid (siNA) molecule of the invention, wherein the chemically-modified siNA comprises an antisense region, where any (e.g., one or more or all) pyrimidine nucleotides present in the antisense region are 2′-deoxy-2′-fluoro pyrimidine nucleotides (e.g., wherein all pyrimidine nucleotides are 2′-deoxy-2′-fluoro pyrimidine nucleotides or alternately a plurality of pyrimidine nucleotides are 2′-deoxy-2′-fluoro pyrimidine nucleotides), and where any (e.g., one or more or all) purine nucleotides present in the antisense region are 2′-O-methyl purine nucleotides (e.g., wherein all purine nucleotides are 2′-O-methyl purine nucleotides or alternately a plurality of purine nucleotides are 2′-O-methyl purine nucleotides).

[0091] In one embodiment, the invention features a chemically-modified short interfering nucleic acid (siNA) molecule of the invention capable of mediating RNA interference (RNAi) against a MAP kinase inside a cell or reconstituted in vitro system, wherein the chemically-modified siNA comprises a sense region, where one or more pyrimidine nucleotides present in the sense region are 2′-deoxy-2′-fluoro pyrimidine nucleotides (e.g., wherein all pyrimidine nucleotides are 2′-deoxy-2′-fluoro pyrimidine nucleotides or alternately a plurality of pyrimidine nucleotides are 2′-deoxy-2′-fluoro pyrimidine nucleotides), and where one or more purine nucleotides present in the sense region are 2′-deoxy purine nucleotides (e.g., wherein all purine nucleotides are 2′-deoxy purine nucleotides or alternately a plurality of purine nucleotides are 2′-deoxy purine nucleotides), and inverted deoxy abasic modifications that are optionally present at the 3′-end, the 5′-end, or both of the 3′ and 5′-ends of the sense region, the sense region optionally further comprising a 3′-terminal overhang having about 1 to about 4 (e.g., about 1, 2, 3, or 4) 2′ -deoxyribonucleotides; and wherein the chemically-modified short interfering nucleic acid molecule comprises an antisense region, where one or more pyrimidine nucleotides present in the antisense region are 2′-deoxy-2′-fluoro pyrimidine nucleotides (e.g., wherein all pyrimidine nucleotides are 2′-deoxy-2′-fluoro pyrimidine nucleotides or alternately a plurality of pyrimidine nucleotides are 2′-deoxy-2′-fluoro pyrimidine nucleotides), and wherein one or more purine nucleotides present in the antisense region are 2′-O-methyl purine nucleotides (e.g., wherein all purine nucleotides are 2′-O-methyl purine nucleotides or alternately a plurality of purine nucleotides are 2′-O-methyl purine nucleotides), and a terminal cap modification, such as any modification described herein or shown in FIG. 10, that is optionally present at the 3′-end, the 5′-end, or both of the 3′ and 5′-ends of the antisense sequence, the antisense region optionally further comprising a 3′-terminal nucleotide overhang having about 1 to about 4 (e.g., about 1, 2, 3, or 4) 2′-deoxynucleotides, wherein the overhang nucleotides can further comprise one or more (e.g., 1, 2, 3, or 4 ) phosphorothioate internucleotide linkages. Non-limiting examples of these chemically-modified siNAs are shown in FIGS. 4 and 5 and Tables III and IV herein.

[0092] In one embodiment, the invention features a chemically-modified short interfering nucleic acid (siNA) molecule of the invention capable of mediating RNA interference (RNAi) against a MAP kinase inside a cell or reconstituted in vitro system, wherein the chemically-modified siNA comprises a sense region, where one or more pyrimidine nucleotides present in the sense region are 2′-deoxy-2′-fluoro pyrimidine nucleotides (e.g., wherein all pyrimidine nucleotides are 2′-deoxy-2′-fluoro pyrimidine nucleotides or alternately a plurality of pyrimidine nucleotides are 2′-deoxy-2′-fluoro pyrimidine nucleotides), and where one or more purine nucleotides present in the sense region are 2′-O-methyl purine nucleotides (e.g., wherein all purine nucleotides are 2′-O-methyl purine nucleotides or alternately a plurality of purine nucleotides are 2′-O-methyl purine nucleotides), and inverted deoxy abasic modifications that are optionally present at the 3′-end, the 5′-end, or both of the 3′ and 5′-ends of the sense region, the sense region optionally further comprising a 3′-terminal overhang having about 1 to about 4 (e.g., about 1, 2, 3, or 4) 2′-deoxyribonucleotides; and wherein the chemically-modified short interfering nucleic acid molecule comprises an antisense region, where one or more pyrimidine nucleotides present in the antisense region are 2′-deoxy-2′-fluoro pyrimidine nucleotides (e.g., wherein all pyrimidine nucleotides are 2′-deoxy-2′-fluoro pyrimidine nucleotides or alternately a plurality of pyrimidine nucleotides are 2′-deoxy-2′-fluoro pyrimidine nucleotides), and wherein one or more purine nucleotides present in the antisense region are 2′-O-methyl purine nucleotides (e.g., wherein all purine nucleotides are 2′-O-methyl purine nucleotides or alternately a plurality of purine nucleotides are 2′-O-methyl purine nucleotides), and a terminal cap modification, such as any modification described herein or shown in FIG. 10, that is optionally present at the 3′-end, the 5′-end, or both of the 3′ and 5′-ends of the antisense sequence, the antisense region optionally further comprising a 3′-terminal nucleotide overhang having about 1 to about 4 (e.g., about 1, 2, 3, or 4) 2′-deoxynucleotides, wherein the overhang nucleotides can further comprise one or more (e.g., 1, 2, 3, or 4 ) phosphorothioate internucleotide linkages. Non-limiting examples of these chemically-modified siNAs are shown in FIGS. 4 and 5 and Tables III and IV herein.

[0093] In one embodiment, the invention features a chemically-modified short interfering nucleic acid (siNA) molecule of the invention capable of mediating RNA interference (RNAi) against a MAP kinase inside a cell or reconstituted in vitro system, wherein the siNA comprises a sense region, where one or more pyrimidine nucleotides present in the sense region are 2′-deoxy-2′-fluoro pyrimidine nucleotides (e.g., wherein all pyrimidine nucleotides are 2′-deoxy-2′-fluoro pyrimidine nucleotides or alternately a plurality of pyrimidine nucleotides are 2′-deoxy-2′-fluoro pyrimidine nucleotides), and where one or more purine nucleotides present in the sense region are purine ribonucleotides (e.g., wherein all purine nucleotides are purine ribonucleotides or alternately a plurality of purine nucleotides are purine ribonucleotides), and inverted deoxy abasic modifications that are optionally present at the 3′-end, the 5′-end, or both of the 3′ and 5′-ends of the sense region, the sense region optionally further comprising a 3′-terminal overhang having about 1 to about 4 (e.g., about 1, 2, 3, or 4) 2′-deoxyribonucleotides; and wherein the siNA comprises an antisense region, where one or more pyrimidine nucleotides present in the antisense region are 2′-deoxy-2′-fluoro pyrimidine nucleotides (e.g., wherein all pyrimidine nucleotides are 2′-deoxy-2′-fluoro pyrimidine nucleotides or alternately a plurality of pyrimidine nucleotides are 2′-deoxy-2′-fluoro pyrimidine nucleotides), and wherein any purine nucleotides present in the antisense region are 2′-O-methyl purine nucleotides (e.g., wherein all purine nucleotides are 2′-O-methyl purine nucleotides or alternately a plurality of purine nucleotides are 2′-O-methyl purine nucleotides), and a terminal cap modification, such as any modification described herein or shown in FIG. 10, that is optionally present at the 3′-end, the 5′-end, or both of the 3′ and 5′-ends of the antisense sequence, the antisense region optionally further comprising a 3′-terminal nucleotide overhang having about 1 to about 4 (e.g., about 1, 2, 3, or 4) 2′-deoxynucleotides, wherein the overhang nucleotides can further comprise one or more (e.g., 1, 2, 3, or 4 ) phosphorothioate internucleotide linkages. Non-limiting examples of these chemically-modified siNAs are shown in FIGS. 4 and 5 and Tables III and IV herein.

[0094] In one embodiment, the invention features a chemically-modified short interfering nucleic acid (siNA) molecule of the invention capable of mediating RNA interference (RNAi) against a MAP kinase inside a cell or reconstituted in vitro system, wherein the chemically-modified siNA comprises a sense region, where one or more pyrimidine nucleotides present in the sense region are 2′-deoxy-2′-fluoro pyrimidine nucleotides (e.g., wherein all pyrimidine nucleotides are 2′-deoxy-2′-fluoro pyrimidine nucleotides or alternately a plurality of pyrimidine nucleotides are 2′-deoxy-2′-fluoro pyrimidine nucleotides), and for example where one or more purine nucleotides present in the sense region are selected from the group consisting of 2′-deoxy nucleotides, locked nucleic acid (LNA) nucleotides, 2′-methoxyethyl nucleotides, 4′-thionucleotides, and 2′-O-methyl nucleotides (e.g., wherein all purine nucleotides are selected from the group consisting of 2′ -deoxy nucleotides, locked nucleic acid (LNA) nucleotides, 2′-methoxyethyl nucleotides, 4′ -thionucleotides, and 2′-O-methyl nucleotides or alternately a plurality of purine nucleotides are selected from the group consisting of 2′-deoxy nucleotides, locked nucleic acid (LNA) nucleotides, 2′-methoxyethyl nucleotides, 4′-thionucleotides, and 2′-O-methyl nucleotides), and wherein inverted deoxy abasic modifications are optionally present at the 3′-end, the 5′ -end, or both of the 3′ and 5′-ends of the sense region, the sense region optionally further comprising a 3′-terminal overhang having about 1 to about 4 (e.g., about 1, 2, 3, or 4) 2′ -deoxyribonucleotides; and wherein the chemically-modified short interfering nucleic acid molecule comprises an antisense region, where one or more pyrimidine nucleotides present in the antisense region are 2′-deoxy-2′-fluoro pyrimidine nucleotides (e.g., wherein all pyrimidine nucleotides are 2′-deoxy-2′-fluoro pyrimidine nucleotides or alternately a plurality of pyrimidine nucleotides are 2′-deoxy-2′-fluoro pyrimidine nucleotides), and wherein one or more purine nucleotides present in the antisense region are selected from the group consisting of 2′-deoxy nucleotides, locked nucleic acid (LNA) nucleotides, 2′-methoxyethyl nucleotides, 4′-thionucleotides, and 2′-O-methyl nucleotides (e.g., wherein all purine nucleotides are selected from the group consisting of 2′-deoxy nucleotides, locked nucleic acid (LNA) nucleotides, 2′-methoxyethyl nucleotides, 4′-thionucleotides, and 2′-O-methyl nucleotides or alternately a plurality of purine nucleotides are selected from the group consisting of 2′-deoxy nucleotides, locked nucleic acid (LNA) nucleotides, 2′-methoxyethyl nucleotides, 4′-thionucleotides, and 2′-O-methyl nucleotides), and a terminal cap modification, such as any modification described herein or shown in FIG. 10, that is optionally present at the 3′-end, the 5′-end, or both of the 3′ and 5′-ends of the antisense sequence, the antisense region optionally further comprising a 3′-terminal nucleotide overhang having about 1 to about 4 (e.g., about 1, 2, 3, or 4) 2′-deoxynucleotides, wherein the overhang nucleotides can further comprise one or more (e.g., 1, 2, 3, or 4) phosphorothioate internucleotide linkages.

[0095] In another embodiment, any modified nucleotides present in the siNA molecules of the invention, preferably in the antisense strand of the siNA molecules of the invention, but also optionally in the sense and/or both antisense and sense strands, comprise modified nucleotides having properties or characteristics similar to naturally occurring ribonucleotides. For example, the invention features siNA molecules including modified nucleotides having a Northern conformation (e.g., Northern pseudorotation cycle, see for example Saenger, Principles of Nucleic Acid Structure, Springer-Verlag ed., 1984). As such, chemically modified nucleotides present in the siNA molecules of the invention, preferably in the antisense strand of the siNA molecules of the invention, but also optionally in the sense and/or both antisense and sense strands, are resistant to nuclease degradation while at the same time maintaining the capacity to mediate RNAi. Non-limiting examples of nucleotides having a northern configuration include locked nucleic acid (LNA) nucleotides (e.g., 2′-O, 4′-C-methylene-(D-ribofuranosyl) nucleotides); 2′-methoxyethoxy (MOE) nucleotides; 2′-methyl-thio-ethyl, 2′-deoxy-2′-fluoro nucleotides, 2′-deoxy-2′ -chloro nucleotides, 2′-azido nucleotides, and 2′-O-methyl nucleotides.

[0096] In one embodiment, the invention features a chemically-modified short interfering nucleic acid molecule (siNA) capable of mediating RNA interference (RNAi) against a MAP kinase inside a cell or reconstituted in vitro system, wherein the chemical modification comprises a conjugate covalently attached to the chemically-modified siNA molecule. In another embodiment, the conjugate is covalently attached to the chemically-modified siNA molecule via a biodegradable linker. In one embodiment, the conjugate molecule is attached at the 3′-end of either the sense strand, the antisense strand, or both strands of the chemically-modified siNA molecule. In another embodiment, the conjugate molecule is attached at the 5′-end of either the sense strand, the antisense strand, or both strands of the chemically-modified siNA molecule. In yet another embodiment, the conjugate molecule is attached both the 3′-end and 5′-end of either the sense strand, the antisense strand, or both strands of the chemically-modified siNA molecule, or any combination thereof. In one embodiment, a conjugate molecule of the invention comprises a molecule that facilitates delivery of a chemically-modified siNA molecule into a biological system, such as a cell. In another embodiment, the conjugate molecule attached to the chemically-modified siNA molecule is a polyethylene glycol, human serum albumin, or a ligand for a cellular receptor that can mediate cellular uptake. Examples of specific conjugate molecules contemplated by the instant invention that can be attached to chemically-modified siNA molecules are described in Vargeese et al., U.S. Ser. No. 10/201,394, incorporated by reference herein. The type of conjugates used and the extent of conjugation of siNA molecules of the invention can be evaluated for improved pharmacokinetic profiles, bioavailability, and/or stability of siNA constructs while at the same time maintaining the ability of the siNA to mediate RNAi activity. As such, one skilled in the art can screen siNA constructs that are modified with various conjugates to determine whether the siNA conjugate complex possesses improved properties while maintaining the ability to mediate RNAi, for example, in animal models as are generally known in the art.

[0097] In one embodiment, the invention features a short interfering nucleic acid (siNA) molecule of the invention, wherein the siNA further comprises a nucleotide, non-nucleotide, or mixed nucleotide/non-nucleotide linker that joins the sense region of the siNA to the antisense region of the siNA. In one embodiment, a nucleotide linker of the invention can be a linker of ≧2 nucleotides in length, for example 3, 4, 5, 6, 7, 8, 9, or 10 nucleotides in length. In another embodiment, the nucleotide linker can be a nucleic acid aptamer. By “aptamer” or “nucleic acid aptamer” as used herein is meant a nucleic acid molecule that binds specifically to a target molecule wherein the nucleic acid molecule has sequence that comprises a sequence recognized by the target molecule in its natural setting. Alternately, an aptamer can be a nucleic acid molecule that binds to a target molecule where the target molecule does not naturally bind to a nucleic acid. The target molecule can be any molecule of interest. For example, the aptamer can be used to bind to a ligand-binding domain of a protein, thereby preventing interaction of the naturally occurring ligand with the protein. This is a non-limiting example and those in the art will recognize that other embodiments can be readily generated using techniques generally known in the art. (See, for example, Gold et al., 1995, Annu. Rev. Biochem., 64, 763; Brody and Gold, 2000, J. Biotechnol., 74, 5; Sun, 2000, Curr. Opin. Mol. Ther., 2, 100; Kusser, 2000, J. Biotechnol., 74, 27; Hermann and Patel, 2000, Science, 287, 820; and Jayasena, 1999, Clinical Chemistry, 45, 1628.)

[0098] In yet another embodiment, a non-nucleotide linker of the invention comprises abasic nucleotide, polyether, polyamine, polyamide, peptide, carbohydrate, lipid, polyhydrocarbon, or other polymeric compounds (e.g. polyethylene glycols such as those having between 2 and 100 ethylene glycol units). Specific examples include those described by Seela and Kaiser, Nucleic Acids Res. 1990, 18:6353 and Nucleic Acids Res. 1987, 15:3113; Cload and Schepartz, J. Am. Chem. Soc. 1991, 113:6324; Richardson and Schepartz, J. Am. Chem. Soc. 1991, 113:5109; Ma et al., Nucleic Acids Res. 1993, 21:2585 and Biochemistry 1993, 32:1751; Durand et al., Nucleic Acids Res. 1990, 18:6353; McCurdy et al., Nucleosides & Nucleotides 1991, 10:287; Jschke et al., Tetrahedron Lett. 1993, 34:301; Ono et al., Biochemistry 1991, 30:9914; Arnold et al., International Publication No. WO 89/02439; Usman et al., International Publication No. WO 95/06731; Dudycz et al., International Publication No. WO 95/11910 and Ferentz and Verdine, J. Am. Chem. Soc. 1991, 113:4000, all hereby incorporated by reference herein. A “non-nucleotide” further means any group or compound that can be incorporated into a nucleic acid chain in the place of one or more nucleotide units, including either sugar and/or phosphate substitutions, and allows the remaining bases to exhibit their enzymatic activity. The group or compound can be abasic in that it does not contain a commonly recognized nucleotide base, such as adenosine, guanine, cytosine, uracil or thymine, for example at the C1 position of the sugar.

[0099] In one embodiment, the invention features a short interfering nucleic acid (siNA) molecule capable of mediating RNA interference (RNAi) inside a cell or reconstituted in vitro system, wherein one or both strands of the siNA molecule that are assembled from two separate oligonucleotides do not comprise any ribonucleotides. For example, a siNA molecule can be assembled from a single oligonculeotide where the sense and antisense regions of the siNA comprise separate oligonucleotides that do not have any ribonucleotides (e.g., nucleotides having a 2′-OH group) present in the oligonucleotides. In another example, a siNA molecule can be assembled from a single oligonculeotide where the sense and antisense regions of the siNA are linked or circularized by a nucleotide or non-nucleotide linker as described herein, wherein the oligonucleotide does not have any ribonucleotides (e.g., nucleotides having a 2′-OH group) present in the oligonucleotide. Applicant has surprisingly found that the presence of ribonucleotides (e.g., nucleotides having a 2′-hydroxyl group) within the siNA molecule is not required or essential to support RNAi activity. As such, in one embodiment, all positions within the siNA can include chemically modified nucleotides and/or non-nucleotides such as nucleotides and or non-nucleotides having Formula I, II, III, IV, V, VI, or VII or any combination thereof to the extent that the ability of the siNA molecule to support RNAi activity in a cell is maintained.

[0100] In one embodiment, a siNA molecule of the invention is a single stranded siNA molecule that mediates RNAi activity in a cell or reconstituted in vitro system, wherein the siNA molecule comprises a single stranded polynucleotide having complementarity to a target nucleic acid sequence. In another embodiment, the single stranded siNA molecule of the invention comprises a 5′-terminal phosphate group. In another embodiment, the single stranded siNA molecule of the invention comprises a 5′-terminal phosphate group and a 3′ -terminal phosphate group (e.g., a 2′,3′-cyclic phosphate). In another embodiment, the single stranded siNA molecule of the invention comprises about 19 to about 29 nucleotides. In yet another embodiment, the single stranded siNA molecule of the invention comprises one or more chemically modified nucleotides or non-nucleotides described herein. For example, all the positions within the siNA molecule can include chemically-modified nucleotides such as nucleotides having any of Formulae I-VII, or any combination thereof to the extent that the ability of the siNA molecule to support RNAi activity in a cell is maintained.

[0101] In one embodiment, a siNA molecule of the invention is a single stranded siNA molecule that mediates RNAi activity in a cell or reconstituted in vitro system, wherein the siNA molecule comprises a single stranded polynucleotide having complementarity to a target nucleic acid sequence, and wherein one or more pyrimidine nucleotides present in the siNA are 2′-deoxy-2′-fluoro pyrimidine nucleotides (e.g., wherein all pyrimidine nucleotides are 2′-deoxy-2′-fluoro pyrimidine nucleotides or alternately a plurality of pyrimidine nucleotides are 2′-deoxy-2′-fluoro pyrimidine nucleotides), and wherein any purine nucleotides present in the antisense region are 2′-O-methyl purine nucleotides (e.g., wherein all purine nucleotides are 2′-O-methyl purine nucleotides or alternately a plurality of purine nucleotides are 2′-O-methyl purine nucleotides), and a terminal cap modification, such as any modification described herein or shown in FIG. 10, that is optionally present at the 3′ -end, the 5′-end, or both of the 3′ and 5′-ends of the antisense sequence, the siNA optionally further comprising about 1 to about 4 (e.g., about 1, 2, 3, or 4) terminal 2′-deoxynucleotides at the 3′-end of the siNA molecule, wherein the terminal nucleotides can further comprise one or more (e.g., 1, 2, 3, or 4 ) phosphorothioate internucleotide linkages, and wherein the siNA optionally further comprises a terminal phosphate group, such as a 5′-terminal phosphate group.

[0102] In one embodiment, a siNA molecule of the invention is a single stranded siNA molecule that mediates RNAi activity in a cell or reconstituted in vitro system, wherein the siNA molecule comprises a single stranded polynucleotide having complementarity to a target nucleic acid sequence, and wherein one or more pyrimidine nucleotides present in the siNA are 2′-deoxy-2′-fluoro pyrimidine nucleotides (e.g., wherein all pyrimidine nucleotides are 2′-deoxy-2′-fluoro pyrimidine nucleotides or alternately a plurality of pyrimidine nucleotides are 2′-deoxy-2′-fluoro pyrimidine nucleotides), and wherein any purine nucleotides present in the siNA are 2′-O-methyl purine nucleotides (e.g., wherein all purine nucleotides are 2′-O-methyl purine nucleotides or alternately a plurality of purine nucleotides are 2′-O-methyl purine nucleotides), and a terminal cap modification, such as any modification described herein or shown in FIG. 10, that is optionally present at the 3′-end, the 5′-end, or both of the 3′ and 5′-ends of the antisense sequence, the siNA optionally further comprising about 1 to about 4 (e.g., about 1, 2, 3, or 4) terminal 2′-deoxynucleotides at the 3′-end of the siNA molecule, wherein the terminal nucleotides can further comprise one or more (e.g., 1, 2, 3, or 4 ) phosphorothioate internucleotide linkages, and wherein the siNA optionally further comprises a terminal phosphate group, such as a 5′-terminal phosphate group.

[0103] In one embodiment, a siNA molecule of the invention is a single stranded siNA molecule that mediates RNAi activity in a cell or reconstituted in vitro system, wherein the siNA molecule comprises a single stranded polynucleotide having complementarity to a target nucleic acid sequence, and wherein one or more pyrimidine nucleotides present in the siNA are 2′-deoxy-2′-fluoro pyrimidine nucleotides (e.g., wherein all pyrimidine nucleotides are 2′-deoxy-2′-fluoro pyrimidine nucleotides or alternately a plurality of pyrimidine nucleotides are 2′-deoxy-2′-fluoro pyrimidine nucleotides), and wherein any purine nucleotides present in the siNA are 2′-deoxy purine nucleotides (e.g., wherein all purine nucleotides are 2′-deoxy purine nucleotides or alternately a plurality of purine nucleotides are 2′-deoxy purine nucleotides), and a terminal cap modification, such as any modification described herein or shown in FIG. 10, that is optionally present at the 3′-end, the 5′-end, or both of the 3′ and 5′-ends of the antisense sequence, the siNA optionally further comprising about 1 to about 4 (e.g., about 1, 2, 3, or 4) terminal 2′-deoxynucleotides at the 3′-end of the siNA molecule, wherein the terminal nucleotides can further comprise one or more (e.g., 1, 2, 3, or 4 ) phosphorothioate internucleotide linkages, and wherein the siNA optionally further comprises a terminal phosphate group, such as a 5′-terminal phosphate group.

[0104] In one embodiment, a siNA molecule of the invention is a single stranded siNA molecule that mediates RNAi activity in a cell or reconstituted in vitro system, wherein the siNA molecule comprises a single stranded polynucleotide having complementarity to a target nucleic acid sequence, and wherein one or more pyrimidine nucleotides present in the siNA are 2′-deoxy-2′-fluoro pyrimidine nucleotides (e.g., wherein all pyrimidine nucleotides are 2′-deoxy-2′-fluoro pyrimidine nucleotides or alternately a plurality of pyrimidine nucleotides are 2′-deoxy-2′-fluoro pyrimidine nucleotides), and wherein any purine nucleotides present in the siNA are locked nucleic acid (LNA) nucleotides (e.g., wherein all purine nucleotides are LNA nucleotides or alternately a plurality of purine nucleotides are LNA nucleotides), and a terminal cap modification, such as any modification described herein or shown in FIG. 10, that is optionally present at the 3′-end, the 5′-end, or both of the 3′ and 5′-ends of the antisense sequence, the siNA optionally further comprising about 1 to about 4 (e.g., about 1, 2, 3, or 4) terminal 2′-deoxynucleotides at the 3′-end of the siNA molecule, wherein the terminal nucleotides can further comprise one or more (e.g., 1, 2, 3, or 4) phosphorothioate internucleotide linkages, and wherein the siNA optionally further comprises a terminal phosphate group, such as a 5′-terminal phosphate group.

[0105] In one embodiment, a siNA molecule of the invention is a single stranded siNA molecule that mediates RNAi activity in a cell or reconstituted in vitro system, wherein the siNA molecule comprises a single stranded polynucleotide having complementarity to a target nucleic acid sequence, and wherein one or more pyrimidine nucleotides present in the siNA are 2′-deoxy-2′-fluoro pyrimidine nucleotides (e.g., wherein all pyrimidine nucleotides are 2′-deoxy-2′-fluoro pyrimidine nucleotides or alternately a plurality of pyrimidine nucleotides are 2′-deoxy-2′-fluoro pyrimidine nucleotides), and wherein any purine nucleotides present in the siNA are 2′-methoxyethyl purine nucleotides (e.g., wherein all purine nucleotides are 2′-methoxyethyl purine nucleotides or alternately a plurality of purine nucleotides are 2′-methoxyethyl purine nucleotides), and a terminal cap modification, such as any modification described herein or shown in FIG. 10, that is optionally present at the 3′-end, the 5′-end, or both of the 3′ and 5′-ends of the antisense sequence, the siNA optionally further comprising about 1 to about 4 (e.g., about 1, 2, 3, or 4) terminal 2′ -deoxynucleotides at the 3′-end of the siNA molecule, wherein the terminal nucleotides can further comprise one or more (e.g., 1, 2, 3, or 4 ) phosphorothioate internucleotide linkages, and wherein the siNA optionally further comprises a terminal phosphate group, such as a 5′-terminal phosphate group.

[0106] In another embodiment, any modified nucleotides present in the single stranded siNA molecules of the invention comprise modified nucleotides having properties or characteristics similar to naturally occurring ribonucleotides. For example, the invention features siNA molecules including modified nucleotides having a Northern conformation (e.g., Northern pseudorotation cycle, see for example Saenger, Principles of Nucleic Acid Structure, Springer-Verlag ed., 1984). As such, chemically modified nucleotides present in the single stranded siNA molecules of the invention are preferably resistant to nuclease degradation while at the same time maintaining the capacity to mediate RNAi.

[0107] In one embodiment, the invention features a method for modulating the expression of a MAP kinase gene within a cell comprising: (a) synthesizing a siNA molecule of the invention, which can be chemically-modified, wherein one of the siNA strands comprises a sequence complementary to RNA of the MAP kinase gene; and (b) introducing the siNA molecule into a cell under conditions suitable to modulate the expression of the MAP kinase gene in the cell.

[0108] In one embodiment, the invention features a method for modulating the expression of a MAP kinase gene within a cell comprising: (a) synthesizing a siNA molecule of the invention, which can be chemically-modified, wherein one of the siNA strands comprises a sequence complementary to RNA of the MAP kinase gene and wherein the sense strand sequence of the siNA comprises a sequence identical to the sequence of the target RNA; and (b) introducing the siNA molecule into a cell under conditions suitable to modulate the expression of the MAP kinase gene in the cell.

[0109] In another embodiment, the invention features a method for modulating the expression of more than one MAP kinase gene within a cell comprising: (a) synthesizing siNA molecules of the invention, which can be chemically-modified, wherein one of the siNA strands comprises a sequence complementary to RNA of the MAP kinase genes; and (b) introducing the siNA molecules into a cell under conditions suitable to modulate the expression of the MAP kinase genes in the cell.

[0110] In another embodiment, the invention features a method for modulating the expression of more than one MAP kinase gene within a cell comprising: (a) synthesizing a siNA molecule of the invention, which can be chemically-modified, wherein one of the siNA strands comprises a sequence complementary to RNA of the MAP kinase gene and wherein the sense strand sequence of the siNA comprises a sequence identical to the sequence of the target RNA; and (b) introducing the siNA molecules into a cell under conditions suitable to modulate the expression of the MAP kinase genes in the cell.

[0111] In one embodiment, siNA molecules of the invention are used as reagents in ex vivo applications. For example, siNA reagents are introduced into tissue or cells that are transplanted into a subject for therapeutic effect. The cells and/or tissue can be derived from an organism or subject that later receives the explant, or can be derived from another organism or subject prior to transplantation. The siNA molecules can be used to modulate the expression of one or more genes in the cells or tissue, such that the cells or tissue obtain a desired phenotype or are able to perform a function when transplanted in vivo. In one embodiment, certain target cells from a patient are extracted. These extracted cells are contacted with siNAs targeting a specific nucleotide sequence within the cells under conditions suitable for uptake of the siNAs by these cells (e.g. using delivery reagents such as cationic lipids, liposomes and the like or using techniques such as electroporation to facilitate the delivery of siNAs into cells). The cells are then reintroduced back into the same patient or other patients. In one embodiment, the invention features a method of modulating the expression of a MAP kinase gene in a tissue explant comprising: (a) synthesizing a siNA molecule of the invention, which can be chemically-modified, wherein one of the siNA strands comprises a sequence complementary to RNA of the MAP kinase gene; and (b) introducing the siNA molecule into a cell of the tissue explant derived from a particular organism under conditions suitable to modulate the expression of the MAP kinase gene in the tissue explant. In another embodiment, the method further comprises introducing the tissue explant back into the organism the tissue was derived from or into another organism under conditions suitable to modulate the expression of the MAP kinase gene in that organism.

[0112] In one embodiment, the invention features a method of modulating the expression of a MAP kinase gene in a tissue explant comprising: (a) synthesizing a siNA molecule of the invention, which can be chemically-modified, wherein one of the siNA strands comprises a sequence complementary to RNA of the MAP kinase gene and wherein the sense strand sequence of the siNA comprises a sequence identical to the sequence of the target RNA; and (b) introducing the siNA molecule into a cell of the tissue explant derived from a particular organism under conditions suitable to modulate the expression of the MAP kinase gene in the tissue explant. In another embodiment, the method further comprises introducing the tissue explant back into the organism the tissue was derived from or into another organism under conditions suitable to modulate the expression of the MAP kinase gene in that organism.

[0113] In another embodiment, the invention features a method of modulating the expression of more than one MAP kinase gene in a tissue explant comprising: (a) synthesizing siNA molecules of the invention, which can be chemically-modified, wherein one of the siNA strands comprises a sequence complementary to RNA of the MAP kinase genes; and (b) introducing the siNA molecules into a cell of the tissue explant derived from a particular organism under conditions suitable to modulate the expression of the MAP kinase genes in the tissue explant. In another embodiment, the method further comprises introducing the tissue explant back into the organism the tissue was derived from or into another organism under conditions suitable to modulate the expression of the MAP kinase genes in that organism.

[0114] In one embodiment, the invention features a method of modulating the expression of a MAP kinase gene in an organism comprising: (a) synthesizing a siNA molecule of the invention, which can be chemically-modified, wherein one of the siNA strands comprises a sequence complementary to RNA of the MAP kinase gene; and (b) introducing the siNA molecule into the organism under conditions suitable to modulate the expression of the MAP kinase gene in the organism.

[0115] In another embodiment, the invention features a method of modulating the expression of more than one MAP kinase gene in an organism comprising: (a) synthesizing siNA molecules of the invention, which can be chemically-modified, wherein one of the siNA strands comprises a sequence complementary to RNA of the MAP kinase genes; and (b) introducing the siNA molecules into the organism under conditions suitable to modulate the expression of the MAP kinase genes in the organism.

[0116] In one embodiment, the invention features a method for modulating the expression of a MAP kinase gene within a cell comprising: (a) synthesizing a siNA molecule of the invention, which can be chemically-modified, wherein the siNA comprises a single stranded sequence having complementarity to RNA of the MAP kinase gene; and (b) introducing the siNA molecule into a cell under conditions suitable to modulate the expression of the MAP kinase gene in the cell.

[0117] In another embodiment, the invention features a method for modulating the expression of more than one MAP kinase gene within a cell comprising: (a) synthesizing siNA molecules of the invention, which can be chemically-modified, wherein the siNA comprises a single stranded sequence having complementarity to RNA of the MAP kinase gene; and (b) contacting the siNA molecule with a cell in vitro or in vivo under conditions suitable to modulate the expression of the MAP kinase genes in the cell.

[0118] In one embodiment, the invention features a method of modulating the expression of a MAP kinase gene in a tissue explant comprising: (a) synthesizing a siNA molecule of the invention, which can be chemically-modified, wherein the siNA comprises a single stranded sequence having complementarity to RNA of the MAP kinase gene; and (b) contacting the siNA molecule with a cell of the tissue explant derived from a particular organism under conditions suitable to modulate the expression of the MAP kinase gene in the tissue explant. In another embodiment, the method further comprises introducing the tissue explant back into the organism the tissue was derived from or into another organism under conditions suitable to modulate the expression of the MAP kinase gene in that organism.

[0119] In another embodiment, the invention features a method of modulating the expression of more than one MAP kinase gene in a tissue explant comprising: (a) synthesizing siNA molecules of the invention, which can be chemically-modified, wherein the siNA comprises a single stranded sequence having complementarity to RNA of the MAP kinase gene; and (b) introducing the siNA molecules into a cell of the tissue explant derived from a particular organism under conditions suitable to modulate the expression of the MAP kinase genes in the tissue explant. In another embodiment, the method further comprises introducing the tissue explant back into the organism the tissue was derived from or into another organism under conditions suitable to modulate the expression of the MAP kinase genes in that organism.

[0120] In one embodiment, the invention features a method of modulating the expression of a MAP kinase gene in an organism comprising: (a) synthesizing a siNA molecule of the invention, which can be chemically-modified, wherein the siNA comprises a single stranded sequence having complementarity to RNA of the MAP kinase gene; and (b) introducing the siNA molecule into the organism under conditions suitable to modulate the expression of the MAP kinase gene in the organism.

[0121] In another embodiment, the invention features a method of modulating the expression of more than one MAP kinase gene in an organism comprising: (a) synthesizing siNA molecules of the invention, which can be chemically-modified, wherein the siNA comprises a single stranded sequence having complementarity to RNA of the MAP kinase gene; and (b) introducing the siNA molecules into the organism under conditions suitable to modulate the expression of the MAP kinase genes in the organism.

[0122] In one embodiment, the invention features a method of modulating the expression of a MAP kinase gene in an organism comprising contacting the organism with a siNA molecule of the invention under conditions suitable to modulate the expression of the MAP kinase gene in the organism.

[0123] In another embodiment, the invention features a method of modulating the expression of more than one MAP kinase gene in an organism comprising contacting the organism with one or more siNA molecules of the invention under conditions suitable to modulate the expression of the MAP kinase genes in the organism.

[0124] The siNA molecules of the invention can be designed to down-regulate or inhibit target (MAP kinase) gene expression through RNAi targeting of a variety of RNA molecules. In one embodiment, the siNA molecules of the invention are used to target various RNAs corresponding to a target gene. Non-limiting examples of such RNAs include messenger RNA (mRNA), alternate RNA splice variants of target gene(s), post-transcriptionally modified RNA of target gene(s), pre-mRNA of target gene(s), and/or RNA templates. If alternate splicing produces a family of transcripts that are distinguished by usage of appropriate exons, the instant invention can be used to inhibit gene expression through the appropriate exons to specifically inhibit or to distinguish among the functions of gene family members. For example, a protein that contains an alternatively spliced transmembrane domain can be expressed in both membrane bound and secreted forms. Use of the invention to target the exon containing the transmembrane domain can be used to determine the functional consequences of pharmaceutical targeting of membrane bound as opposed to the secreted form of the protein. Non-limiting examples of applications of the invention relating to targeting these RNA molecules include therapeutic pharmaceutical applications, pharmaceutical discovery applications, molecular diagnostic and gene function applications, and gene mapping, for example using single nucleotide polymorphism mapping with siNA molecules of the invention. Such applications can be implemented using known gene sequences or from partial sequences available from an expressed sequence tag (EST).

[0125] In another embodiment, the siNA molecules of the invention are used to target conserved sequences corresponding to a gene family or gene families such as MAP kinase family genes. As such, siNA molecules targeting multiple MAP kinase targets can provide increased therapeutic effect. In addition, siNA can be used to characterize pathways of gene function in a variety of applications. For example, the present invention can be used to inhibit the activity of target gene(s) in a pathway to determine the function of uncharacterized gene(s) in gene function analysis, mRNA function analysis, or translational analysis. The invention can be used to determine potential target gene pathways involved in various diseases and conditions toward pharmaceutical development. The invention can be used to understand pathways of gene expression involved in, for example, the progression and/or maintenance of cancer.

[0126] In one embodiment, siNA molecule(s) and/or methods of the invention are used to down-regulate the expression of gene(s) that encode RNA referred to by Genbank Accession, for example MAP kinase genes encoding RNA sequence(s) referred to herein by Genbank Accession number, for example, Genbank Accession Nos. shown in Table I.

[0127] In one embodiment, the invention features a method comprising: (a) generating a library of siNA constructs having a predetermined complexity; and (b) assaying the siNA constructs of (a) above, under conditions suitable to determine RNAi target sites within the target RNA sequence. In one embodiment, the siNA molecules of (a) have strands of a fixed length, for example, about 23 nucleotides in length. In another embodiment, the siNA molecules of (a) are of differing length, for example having strands of about 19 to about 25 (e.g., about 19, 20, 21, 22, 23, 24, or 25) nucleotides in length. In one embodiment, the assay can comprise a reconstituted in vitro siNA assay as described herein. In another embodiment, the assay can comprise a cell culture system in which target RNA is expressed. In another embodiment, fragments of target RNA are analyzed for detectable levels of cleavage, for example by gel electrophoresis, northern blot analysis, or RNAse protection assays, to determine the most suitable target site(s) within the target RNA sequence. The target RNA sequence can be obtained as is known in the art, for example, by cloning and/or transcription for in vitro systems, and by cellular expression in in vivo systems.

[0128] In one embodiment, the invention features a method comprising: (a) generating a randomized library of siNA constructs having a predetermined complexity, such as of 4N, where N represents the number of base paired nucleotides in each of the siNA construct strands (e.g. for a siNA construct having 21 nucleotide sense and antisense strands with 19 base pairs, the complexity would be 419); and (b) assaying the siNA constructs of (a) above, under conditions suitable to determine RNAi target sites within the target MAP kinase RNA sequence. In another embodiment, the siNA molecules of (a) have strands of a fixed length, for example about 23 nucleotides in length. In yet another embodiment, the siNA molecules of (a) are of differing length, for example having strands of about 19 to about 25 (e.g., about 19, 20, 21, 22, 23, 24, or 25) nucleotides in length. In one embodiment, the assay can comprise a reconstituted in vitro siNA assay as described in Example 7 herein. In another embodiment, the assay can comprise a cell culture system in which target RNA is expressed. In another embodiment, fragments of MAP kinase RNA are analyzed for detectable levels of cleavage, for example by gel electrophoresis, northern blot analysis, or RNAse protection assays, to determine the most suitable target site(s) within the target MAP kinase RNA sequence. The target MAP kinase RNA sequence can be obtained as is known in the art, for example, by cloning and/or transcription for in vitro systems, and by cellular expression in in vivo systems.

[0129] In another embodiment, the invention features a method comprising: (a) analyzing the sequence of a RNA target encoded by a target gene; (b) synthesizing one or more sets of siNA molecules having sequence complementary to one or more regions of the RNA of (a); and (c) assaying the siNA molecules of (b) under conditions suitable to determine RNAi targets within the target RNA sequence. In one embodiment, the siNA molecules of (b) have strands of a fixed length, for example about 23 nucleotides in length. In another embodiment, the siNA molecules of (b) are of differing length, for example having strands of about 19 to about 25 (e.g., about 19, 20, 21, 22, 23, 24, or 25) nucleotides in length. In one embodiment, the assay can comprise a reconstituted in vitro siNA assay as described herein. In another embodiment, the assay can comprise a cell culture system in which target RNA is expressed. Fragments of target RNA are analyzed for detectable levels of cleavage, for example by gel electrophoresis, northern blot analysis, or RNAse protection assays, to determine the most suitable target site(s) within the target RNA sequence. The target RNA sequence can be obtained as is known in the art, for example, by cloning and/or transcription for in vitro systems, and by expression in in vivo systems.

[0130] By “target site” is meant a sequence within a target RNA that is “targeted” for cleavage mediated by a siNA construct which contains sequences within its antisense region that are complementary to the target sequence.

[0131] By “detectable level of cleavage” is meant cleavage of target RNA (and formation of cleaved product RNAs) to an extent sufficient to discern cleavage products above the background of RNAs produced by random degradation of the target RNA. Production of cleavage products from 1-5% of the target RNA is sufficient to detect above the background for most methods of detection.

[0132] In one embodiment, the invention features a composition comprising a siNA molecule of the invention, which can be chemically-modified, in a pharmaceutically acceptable carrier or diluent. In another embodiment, the invention features a pharmaceutical composition comprising siNA molecules of the invention, which can be chemically-modified, targeting one or more genes in a pharmaceutically acceptable carrier or diluent. In another embodiment, the invention features a method for diagnosing a disease or condition in a subject comprising administering to the subject a composition of the invention under conditions suitable for the diagnosis of the disease or condition in the subject. In another embodiment, the invention features a method for treating or preventing a disease or condition in a subject, comprising administering to the subject a composition of the invention under conditions suitable for the treatment or prevention of the disease or condition in the subject, alone or in conjunction with one or more other therapeutic compounds. In yet another embodiment, the invention features a method for reducing or preventing tissue rejection in a subject comprising administering to the subject a composition of the invention under conditions suitable for the reduction or prevention of tissue rejection in the subject.

[0133] In another embodiment, the invention features a method for validating a MAP kinase gene target comprising: (a) synthesizing a siNA molecule of the invention, which can be chemically-modified, wherein one of the siNA strands includes a sequence complementary to RNA of a MAP kinase target gene; (b) introducing the siNA molecule into a cell, tissue, or organism under conditions suitable for modulating expression of the MAP kinase target gene in the cell, tissue, or organism; and (c) determining the function of the gene by assaying for any phenotypic change in the cell, tissue, or organism.

[0134] In another embodiment, the invention features a method for validating a MAP kinase target comprising: (a) synthesizing a siNA molecule of the invention, which can be chemically-modified, wherein one of the siNA strands includes a sequence complementary to RNA of a MAP kinase target gene; (b) introducing the siNA molecule into a biological system under conditions suitable for modulating expression of the MAP kinase target gene in the biological system; and (c) determining the function of the gene by assaying for any phenotypic change in the biological system.

[0135] By “biological system” is meant, material, in a purified or unpurified form, from biological sources, including but not limited to human, animal, plant, insect, bacterial, viral or other sources, wherein the system comprises the components required for RNAi activity. The term “biological system” includes, for example, a cell, tissue, or organism, or extract thereof. The term biological system also includes reconstituted RNAi systems that can be used in an in vitro setting.

[0136] By “phenotypic change” is meant any detectable change to a cell that occurs in response to contact or treatment with a nucleic acid molecule of the invention (e.g., siNA). Such detectable changes include, but are not limited to, changes in shape, size, proliferation, motility, protein expression or RNA expression or other physical or chemical changes as can be assayed by methods known in the art. The detectable change can also include expression of reporter genes/molecules such as Green Florescent Protein (GFP) or various tags that are used to identify an expressed protein or any other cellular component that can be assayed.

[0137] In one embodiment, the invention features a kit containing a siNA molecule of the invention, which can be chemically-modified, that can be used to modulate the expression of a MAP kinase target gene in a biological system, including, for example, in a cell, tissue, or organism. In another embodiment, the invention features a kit containing more than one siNA molecule of the invention, which can be chemically-modified, that can be used to modulate the expression of more than one MAP kinase target gene in a biological system, including, for example, in a cell, tissue, or organism.

[0138] In one embodiment, the invention features a cell containing one or more siNA molecules of the invention, which can be chemically-modified. In another embodiment, the cell containing a siNA molecule of the invention is a mammalian cell. In yet another embodiment, the cell containing a siNA molecule of the invention is a human cell.

[0139] In one embodiment, the synthesis of a siNA molecule of the invention, which can be chemically-modified, comprises: (a) synthesis of two complementary strands of the siNA molecule; (b) annealing the two complementary strands together under conditions suitable to obtain a double-stranded siNA molecule. In another embodiment, synthesis of the two complementary strands of the siNA molecule is by solid phase oligonucleotide synthesis. In yet another embodiment, synthesis of the two complementary strands of the siNA molecule is by solid phase tandem oligonucleotide synthesis.

[0140] In one embodiment, the invention features a method for synthesizing a siNA duplex molecule comprising: (a) synthesizing a first oligonucleotide sequence strand of the siNA molecule, wherein the first oligonucleotide sequence strand comprises a cleavable linker molecule that can be used as a scaffold for the synthesis of the second oligonucleotide sequence strand of the siNA; (b) synthesizing the second oligonucleotide sequence strand of siNA on the scaffold of the first oligonucleotide sequence strand, wherein the second oligonucleotide sequence strand further comprises a chemical moiety than can be used to purify the siNA duplex; (c) cleaving the linker molecule of (a) under conditions suitable for the two siNA oligonucleotide strands to hybridize and form a stable duplex; and (d) purifying the siNA duplex utilizing the chemical moiety of the second oligonucleotide sequence strand. In one embodiment, cleavage of the linker molecule in (c) above takes place during deprotection of the oligonucleotide, for example, under hydrolysis conditions using an alkylamine base such as methylamine. In one embodiment, the method of synthesis comprises solid phase synthesis on a solid support such as controlled pore glass (CPG) or polystyrene, wherein the first sequence of (a) is synthesized on a cleavable linker, such as a succinyl linker, using the solid support as a scaffold. The cleavable linker in (a) used as a scaffold for synthesizing the second strand can comprise similar reactivity as the solid support derivatized linker, such that cleavage of the solid support derivatized linker and the cleavable linker of (a) takes place concomitantly. In another embodiment, the chemical moiety of (b) that can be used to isolate the attached oligonucleotide sequence comprises a trityl group, for example a dimethoxytrityl group, which can be employed in a trityl-on synthesis strategy as described herein. In yet another embodiment, the chemical moiety, such as a dimethoxytrityl group, is removed during purification, for example, using acidic conditions.

[0141] In a further embodiment, the method for siNA synthesis is a solution phase synthesis or hybrid phase synthesis wherein both strands of the siNA duplex are synthesized in tandem using a cleavable linker attached to the first sequence which acts a scaffold for synthesis of the second sequence. Cleavage of the linker under conditions suitable for hybridization of the separate siNA sequence strands results in formation of the double-stranded siNA molecule.

[0142] In another embodiment, the invention features a method for synthesizing a siNA duplex molecule comprising: (a) synthesizing one oligonucleotide sequence strand of the siNA molecule, wherein the sequence comprises a cleavable linker molecule that can be used as a scaffold for the synthesis of another oligonucleotide sequence; (b) synthesizing a second oligonucleotide sequence having complementarity to the first sequence strand on the scaffold of (a), wherein the second sequence comprises the other strand of the double-stranded siNA molecule and wherein the second sequence further comprises a chemical moiety than can be used to isolate the attached oligonucleotide sequence; (c) purifying the product of (b) utilizing the chemical moiety of the second oligonucleotide sequence strand under conditions suitable for isolating the full-length sequence comprising both siNA oligonucleotide strands connected by the cleavable linker and under conditions suitable for the two siNA oligonucleotide strands to hybridize and form a stable duplex. In one embodiment, cleavage of the linker molecule in (c) above takes place during deprotection of the oligonucleotide, for example under hydrolysis conditions. In another embodiment, cleavage of the linker molecule in (c) above takes place after deprotection of the oligonucleotide. In another embodiment, the method of synthesis comprises solid phase synthesis on a solid support such as controlled pore glass (CPG) or polystyrene, wherein the first sequence of (a) is synthesized on a cleavable linker, such as a succinyl linker, using the solid support as a scaffold. The cleavable linker in (a) used as a scaffold for synthesizing the second strand can comprise similar reactivity or differing reactivity as the solid support derivatized linker, such that cleavage of the solid support derivatized linker and the cleavable linker of (a) takes place either concomitantly or sequentially. In one embodiment, the chemical moiety of (b) that can be used to isolate the attached oligonucleotide sequence comprises a trityl group, for example a dimethoxytrityl group.

[0143] In another embodiment, the invention features a method for making a double-stranded siNA molecule in a single synthetic process comprising: (a) synthesizing an oligonucleotide having a first and a second sequence, wherein the first sequence is complementary to the second sequence, and the first oligonucleotide sequence is linked to the second sequence via a cleavable linker, and wherein a terminal 5′-protecting group, for example, a 5′-O-dimethoxytrityl group (5′-O-DMT) remains on the oligonucleotide having the second sequence; (b) deprotecting the oligonucleotide whereby the deprotection results in the cleavage of the linker joining the two oligonucleotide sequences; and (c) purifying the product of (b) under conditions suitable for isolating the double-stranded siNA molecule, for example using a trityl-on synthesis strategy as described herein.

[0144] In another embodiment, the method of synthesis of siNA molecules of the invention comprises the teachings of Scaringe et al., U.S. Pat. Nos. 5,889,136; 6,008,400; and 6,111,086, incorporated by reference herein in their entirety. In one embodiment, the invention features siNA constructs that mediate RNAi against a MAP kinase, wherein the siNA construct comprises one or more chemical modifications, for example, one or more chemical modifications having any of Formulae I-VII or any combination thereof that increases the nuclease resistance of the siNA construct.

[0145] In another embodiment, the invention features a method for generating siNA molecules with increased nuclease resistance comprising (a) introducing nucleotides having any of Formula I-VII or any combination thereof into a siNA molecule, and (b) assaying the siNA molecule of step (a) under conditions suitable for isolating siNA molecules having increased nuclease resistance.

[0146] In one embodiment, the invention features siNA constructs that mediate RNAi against a MAP kinase, wherein the siNA construct comprises one or more chemical modifications described herein that modulates the binding affinity between the sense and antisense strands of the siNA construct.

[0147] In another embodiment, the invention features a method for generating siNA molecules with increased binding affinity between the sense and antisense strands of the siNA molecule comprising (a) introducing nucleotides having any of Formula I-VII or any combination thereof into a siNA molecule, and (b) assaying the siNA molecule of step (a) under conditions suitable for isolating siNA molecules having increased binding affinity between the sense and antisense strands of the siNA molecule.

[0148] In one embodiment, the invention features siNA constructs that mediate RNAi against a MAP kinase, wherein the siNA construct comprises one or more chemical modifications described herein that modulates the binding affinity between the antisense strand of the siNA construct and a complementary target RNA sequence within a cell.

[0149] In one embodiment, the invention features siNA constructs that mediate RNAi against a MAP kinase, wherein the siNA construct comprises one or more chemical modifications described herein that modulates the binding affinity between the antisense strand of the siNA construct and a complementary target DNA sequence within a cell.

[0150] In another embodiment, the invention features a method for generating siNA molecules with increased binding affinity between the antisense strand of the siNA molecule and a complementary target RNA sequence comprising (a) introducing nucleotides having any of Formula I-VII or any combination thereof into a siNA molecule, and (b) assaying the siNA molecule of step (a) under conditions suitable for isolating siNA molecules having increased binding affinity between the antisense strand of the siNA molecule and a complementary target RNA sequence.

[0151] In another embodiment, the invention features a method for generating siNA molecules with increased binding affinity between the antisense strand of the siNA molecule and a complementary target DNA sequence comprising (a) introducing nucleotides having any of Formula I-VII or any combination thereof into a siNA molecule, and (b) assaying the siNA molecule of step (a) under conditions suitable for isolating siNA molecules having increased binding affinity between the antisense strand of the siNA molecule and a complementary target DNA sequence.

[0152] In one embodiment, the invention features siNA constructs that mediate RNAi against a MAP kinase, wherein the siNA construct comprises one or more chemical modifications described herein that modulate the polymerase activity of a cellular polymerase capable of generating additional endogenous siNA molecules having sequence homology to the chemically-modified siNA construct.

[0153] In another embodiment, the invention features a method for generating siNA molecules capable of mediating increased polymerase activity of a cellular polymerase capable of generating additional endogenous siNA molecules having sequence homology to a chemically-modified siNA molecule comprising (a) introducing nucleotides having any of Formula I-VII or any combination thereof into a siNA molecule, and (b) assaying the siNA molecule of step (a) under conditions suitable for isolating siNA molecules capable of mediating increased polymerase activity of a cellular polymerase capable of generating additional endogenous siNA molecules having sequence homology to the chemically-modified siNA molecule.

[0154] In one embodiment, the invention features chemically-modified siNA constructs that mediate RNAi against a MAP kinase in a cell, wherein the chemical modifications do not significantly effect the interaction of siNA with a target RNA molecule, DNA molecule and/or proteins or other factors that are essential for RNAi in a manner that would decrease the efficacy of RNAi mediated by such siNA constructs.

[0155] In another embodiment, the invention features a method for generating siNA molecules with improved RNAi activity against MAP kinase comprising (a) introducing nucleotides having any of Formula I-VII or any combination thereof into a siNA molecule, and (b) assaying the siNA molecule of step (a) under conditions suitable for isolating siNA molecules having improved RNAi activity.

[0156] In yet another embodiment, the invention features a method for generating siNA molecules with improved RNAi activity against a MAP kinase target RNA comprising (a) introducing nucleotides having any of Formula I-VII or any combination thereof into a siNA molecule, and (b) assaying the siNA molecule of step (a) under conditions suitable for isolating siNA molecules having improved RNAi activity against the target RNA.

[0157] In yet another embodiment, the invention features a method for generating siNA molecules with improved RNAi activity against a MAP kinase target DNA comprising (a) introducing nucleotides having any of Formula I-VII or any combination thereof into a siNA molecule, and (b) assaying the siNA molecule of step (a) under conditions suitable for isolating siNA molecules having improved RNAi activity against the target DNA.

[0158] In one embodiment, the invention features siNA constructs that mediate RNAi against a MAP kinase, wherein the siNA construct comprises one or more chemical modifications described herein that modulates the cellular uptake of the siNA construct.

[0159] In another embodiment, the invention features a method for generating siNA molecules against MAP kinase with improved cellular uptake comprising (a) introducing nucleotides having any of Formula I-VII or any combination thereof into a siNA molecule, and (b) assaying the siNA molecule of step (a) under conditions suitable for isolating siNA molecules having improved cellular uptake.

[0160] In one embodiment, the invention features siNA constructs that mediate RNAi against a MAP kinase, wherein the siNA construct comprises one or more chemical modifications described herein that increases the bioavailability of the siNA construct, for example, by attaching polymeric conjugates such as polyethyleneglycol or equivalent conjugates that improve the pharmacokinetics of the siNA construct, or by attaching conjugates that target specific tissue types or cell types in vivo. Non-limiting examples of such conjugates are described in Vargeese et al., U.S. Ser. No. 10/201,394 incorporated by reference herein.

[0161] In one embodiment, the invention features a method for generating siNA molecules of the invention with improved bioavailability comprising (a) introducing a conjugate into the structure of a siNA molecule, and (b) assaying the siNA molecule of step (a) under conditions suitable for isolating siNA molecules having improved bioavailability. Such conjugates can include ligands for cellular receptors, such as peptides derived from naturally occurring protein ligands; protein localization sequences, including cellular ZIP code sequences; antibodies; nucleic acid aptamers; vitamins and other co-factors, such as folate and N-acetylgalactosamine; polymers, such as polyethyleneglycol (PEG); phospholipids; cholesterol; polyamines, such as spermine or spermidine; and others.

[0162] In another embodiment, the invention features a method for generating siNA molecules of the invention with improved bioavailability comprising (a) introducing an excipient formulation to a siNA molecule, and (b) assaying the siNA molecule of step (a) under conditions suitable for isolating siNA molecules having improved bioavailability. Such excipients include polymers such as cyclodextrins, lipids, cationic lipids, polyamines, phospholipids, and others.

[0163] In another embodiment, the invention features a method for generating siNA molecules of the invention with improved bioavailability comprising (a) introducing nucleotides having any of Formulae I-VII or any combination thereof into a siNA molecule, and (b) assaying the siNA molecule of step (a) under conditions suitable for isolating siNA molecules having improved bioavailability.

[0164] In another embodiment, polyethylene glycol (PEG) can be covalently attached to siNA compounds of the present invention. The attached PEG can be any molecular weight, preferably from about 2,000 to about 50,000 daltons (Da).

[0165] The present invention can be used alone or as a component of a kit having at least one of the reagents necessary to carry out the in vitro or in vivo introduction of RNA to test samples and/or subjects. For example, preferred components of the kit include a siNA molecule of the invention and a vehicle that promotes introduction of the siNA into cells of interest as described herein (e.g., using lipids and other methods of transfection known in the art, see for example Beigelman et al, U.S. Pat. No. 6,395,713). The kit can be used for target validation, such as in determining gene function and/or activity, or in drug optimization, and in drug discovery (see for example Usman et al., U.S. Ser. No. 60/402,996). Such a kit can also include instructions to allow a user of the kit to practice the invention.

[0166] The term “short interfering nucleic acid”, “siNA”, “short interfering RNA”, “siRNA”, “short interfering nucleic acid molecule”, “short interfering oligonucleotide molecule”, or “chemically-modified short interfering nucleic acid molecule” as used herein refers to any nucleic acid molecule capable of inhibiting or down regulating gene expression, for example by mediating RNA interference “RNAi” or gene silencing in a sequence-specific manner; see for example Bass, 2001, Nature, 411, 428-429; Elbashir et al., 2001, Nature, 411, 494-498; and Kreutzer et al., International PCT Publication No. WO 00/44895; Zernicka-Goetz et al., International PCT Publication No. WO 01/36646; Fire, International PCT Publication No. WO 99/32619; Plaetinck et al., International PCT Publication No. WO 00/01846; Mello and Fire, International PCT Publication No. WO 01/29058; Deschamps-Depaillette, International PCT Publication No. WO 99/07409; and Li et al., International PCT Publication No. WO 00/44914; Allshire, 2002, Science, 297, 1818-1819; Volpe et al., 2002, Science, 297, 1833-1837; Jenuwein, 2002, Science, 297, 2215-2218; and Hall et al., 2002, Science, 297, 2232-2237; Hutvagner and Zamore, 2002, Science, 297, 2056-60; McManus et al., 2002, RNA, 8, 842-850; Reinhart et al., 2002, Gene & Dev., 16, 1616-1626; and Reinhart & Bartel, 2002, Science, 297, 1831). Non limiting examples of siNA molecules of the invention are shown in FIGS. 4-6, and Tables II, III, and IV herein. For example the siNA can be a double-stranded polynucleotide molecule comprising self-complementary sense and antisense regions, wherein the antisense region comprises nucleotide sequence that is complementary to nucleotide sequence in a target nucleic acid molecule or a portion thereof and the sense region having nucleotide sequence corresponding to the target nucleic acid sequence or a portion thereof. The siNA can be assembled from two separate oligonucleotides, where one strand is the sense strand and the other is the antisense strand, wherein the antisense and sense strands are self-complementary (i.e. each strand comprises nucleotide sequence that is complementary to nucleotide sequence in the other strand; such as where the antisense strand and sense strand form a duplex or double stranded structure, for example wherein the double stranded region is about 19 base pairs); the antisense strand comprises nucleotide sequence that is complementary to nucleotide sequence in a target nucleic acid molecule or a portion thereof and the sense strand comprises nucleotide sequence corresponding to the target nucleic acid sequence or a portion thereof. Alternatively, the siNA is assembled from a single oligonucleotide, where the self-complementary sense and antisense regions of the siNA are linked by means of a nucleic acid based or non-nucleic acid-based linker(s). The siNA can be a polynucleotide with a hairpin secondary structure, having self-complementary sense and antisense regions, wherein the antisense region comprises nucleotide sequence that is complementary to nucleotide sequence in a separate target nucleic acid molecule or a portion thereof and the sense region having nucleotide sequence corresponding to the target nucleic acid sequence or a portion thereof. The siNA can be a circular single-stranded polynucleotide having two or more loop structures and a stem comprising self-complementary sense and antisense regions, wherein the antisense region comprises nucleotide sequence that is complementary to nucleotide sequence in a target nucleic acid molecule or a portion thereof and the sense region having nucleotide sequence corresponding to the target nucleic acid sequence or a portion thereof, and wherein the circular polynucleotide can be processed either in vivo or in vitro to generate an active siNA molecule capable of mediating RNAi. The siNA can also comprise a single stranded polynucleotide having nucleotide sequence complementary to nucleotide sequence in a target nucleic acid molecule or a portion thereof (for example, where such siNA molecule does not require the presence within the siNA molecule of nucleotide sequence corresponding to the target nucleic acid sequence or a portion thereof), wherein the single stranded polynucleotide can further comprise a terminal phosphate group, such as a 5′-phosphate (see for example Martinez et al., 2002, Cell., 110, 563-574 and Schwarz et al., 2002, Molecular Cell, 10, 537-568), or 5′,3′-diphosphate. In certain embodiment, the siNA molecule of the invention comprises separate sense and antisense sequences or regions, wherein the sense and antisense regions are covalently linked by nucleotide or non-nucleotide linkers molecules as is known in the art, or are alternately non-covalently linked by ionic interactions, hydrogen bonding, van der waals interactions, hydrophobic intercations, and/or stacking interactions. In certain embodiments, the siNA molecules of the invention comprise nucleotide sequence that is complementary to nucleotide sequence of a target gene. In another embodiment, the siNA molecule of the invention interacts with nucleotide sequence of a target gene in a manner that causes inhibition of expression of the target gene. As used herein, siNA molecules need not be limited to those molecules containing only RNA, but further encompasses chemically-modified nucleotides and non-nucleotides. In certain embodiments, the short interfering nucleic acid molecules of the invention lack 2′-hydroxy (2′-OH) containing nucleotides. Applicant describes in certain embodiments short interfering nucleic acids that do not require the presence of nucleotides having a 2′-hydroxy group for mediating RNAi and as such, short interfering nucleic acid molecules of the invention optionally do not include any ribonucleotides (e.g., nucleotides having a 2′-OH group). Such siNA molecules that do not require the presence of ribonucleotides within the siNA molecule to support RNAi can however have an attached linker or linkers or other attached or associated groups, moieties, or chains containing one or more nucleotides with 2′-OH groups. Optionally, siNA molecules can comprise ribonucleotides at about 5, 10, 20, 30, 40, or 50% of the nucleotide positions. The modified short interfering nucleic acid molecules of the invention can also be referred to as short interfering modified oligonucleotides “siMON.” As used herein, the term siNA is meant to be equivalent to other terms used to describe nucleic acid molecules that are capable of mediating sequence specific RNAi, for example short interfering RNA (siRNA), double-stranded RNA (dsRNA), micro-RNA (miRNA), short hairpin RNA (shRNA), short interfering oligonucleotide, short interfering nucleic acid, short interfering modified oligonucleotide, chemically-modified siRNA, post-transcriptional gene silencing RNA (ptgsRNA), and others. In addition, as used herein, the term RNAi is meant to be equivalent to other terms used to describe sequence specific RNA interference, such as post transcriptional gene silencing, translational inhibition, or epigenetics. For example, siNA molecules of the invention can be used to epigenetically silence genes at both the post-transcriptional level or the pre-transcriptional level. In a non-limiting example, epigenetic regulation of gene expression by siNA molecules of the invention can result from siNA mediated modification of chromatin structure to alter gene expression (see, for example, Allshire, 2002, Science, 297, 1818-1819; Volpe et al., 2002, Science, 297, 1833-1837; Jenuwein, 2002, Science, 297, 2215-2218; and Hall et al., 2002, Science, 297, 2232-2237).

[0167] By “modulate” is meant that the expression of the gene, or level of RNA molecule or equivalent RNA molecules encoding one or more proteins or protein subunits, or activity of one or more proteins or protein subunits is up regulated or down regulated, such that expression, level, or activity is greater than or less than that observed in the absence of the modulator. For example, the term “modulate” can mean “inhibit,” but the use of the word “modulate” is not limited to this definition.

[0168] By “inhibit”, “down-regulate”, or “reduce”, it is meant that the expression of the gene, or level of RNA molecules or equivalent RNA molecules encoding one or more proteins or protein subunits, or activity of one or more proteins or protein subunits, is reduced below that observed in the absence of the nucleic acid molecules (e.g., siNA) of the invention. In one embodiment, inhibition, down-regulation or reduction with an siNA molecule is below that level observed in the presence of an inactive or attenuated molecule. In another embodiment, inhibition, down-regulation, or reduction with siNA molecules is below that level observed in the presence of, for example, an siNA molecule with scrambled sequence or with mismatches. In another embodiment, inhibition, down-regulation, or reduction of gene expression with a nucleic acid molecule of the instant invention is greater in the presence of the nucleic acid molecule than in its absence.

[0169] By “gene” or “target gene” is meant, a nucleic acid that encodes an RNA, for example, nucleic acid sequences including, but not limited to, structural genes encoding a polypeptide. The target gene can be a gene derived from a cell, an endogenous gene, a transgene, or exogenous genes such as genes of a pathogen, for example a virus, which is present in the cell after infection thereof. The cell containing the target gene can be derived from or contained in any organism, for example a plant, animal, protozoan, virus, bacterium, or fungus. Non-limiting examples of plants include monocots, dicots, or gymnosperms. Non-limiting examples of animals include vertebrates or invertebrates. Non-limiting examples of fungi include molds or yeasts.

[0170] By “MAP kinase” is meant, any mitogen activated protein kinase (MAP kinase) polypeptide, protein and/or a polynucleotide encoding a MAP kinase protein (such as polynucleotides referred to by Genbank Accession number in Table I or any other MAP kinase transcript derived from a MAP kinase gene, e.g., c-JUN, ERK1, ERK2, JNK1, JNK2, and/or p38). As used herein, the term “MAP kinase gene” is meant to refer to any polynucleotide included in a group of MAP kinase genes, such as c-JUN, ERK1, ERK2, JNK1, JNK2, and/or p38).

[0171] By “MAP kinase protein” is meant, any mitogen activated protein kinase (MAP kinase) peptide or protein or a component thereof, wherein the peptide or protein is encoded by a MAP kinase gene (e.g., c-JUN, ERK1, ERK2, JNK1, JNK2, and/or p38).

[0172] By “highly conserved sequence region” is meant a nucleotide sequence of one or more regions in a target gene does not vary significantly from one generation to the other or from one biological system to the other.

[0173] By “sense region” is meant a nucleotide sequence of a siNA molecule having complementarity to an antisense region of the siNA molecule. In addition, the sense region of a siNA molecule can comprise a nucleic acid sequence having homology with a target nucleic acid sequence.

[0174] By “antisense region” is meant a nucleotide sequence of a siNA molecule having complementarity to a target nucleic acid sequence. In addition, the antisense region of a siNA molecule can optionally comprise a nucleic acid sequence having complementarity to a sense region of the siNA molecule.

[0175] By “target nucleic acid” is meant any nucleic acid sequence whose expression or activity is to be modulated. The target nucleic acid can be DNA or RNA.

[0176] By “complementarity” is meant that a nucleic acid can form hydrogen bond(s) with another nucleic acid sequence by either traditional Watson-Crick or other non-traditional types. In reference to the nucleic molecules of the present invention, the binding free energy for a nucleic acid molecule with its complementary sequence is sufficient to allow the relevant function of the nucleic acid to proceed, e.g., RNAi activity. Determination of binding free energies for nucleic acid molecules is well known in the art (see, e.g., Turner et al., 1987, CSH Symp. Quant. Biol. LII pp.123-133; Frier et al., 1986, Proc. Nat. Acad. Sci. USA 83:9373-9377; Turner et al., 1987, J. Am. Chem. Soc. 109:3783-3785). A percent complementarity indicates the percentage of contiguous residues in a nucleic acid molecule that can form hydrogen bonds (e.g., Watson-Crick base pairing) with a second nucleic acid sequence (e.g., 5, 6, 7, 8, 9, 10 out of 10 being 50%, 60%, 70%, 80%, 90%, and 100% complementary). “Perfectly complementary” means that all the contiguous residues of a nucleic acid sequence will hydrogen bond with the same number of contiguous residues in a second nucleic acid sequence.

[0177] The siRNA molecules of the invention represent a novel therapeutic approach to treat a variety of pathologic indications or other conditions, including oncology and proliferation related indications and conditions such as multidrug resistant cancers, breast cancer, cancers of the head and neck including various lymphomas such as mantle cell lymphoma, non-Hodgkins lymphoma, adenoma, squamous cell carcinoma, laryngeal carcinoma, cancers of the retina, cancers of the esophagus, multiple myeloma, ovarian cancer, melanoma, colorectal cancer, hepatocellular carcinoma, lung cancer, bladder cancer, pancreatic cancer, prostate cancer, glioblastoma; obesity and insulin resistance (e.g. type I and II diabetes); inflammatory disorders such as asthma, septic shock, rheumatoid arthritis, psoriasis, inflammatory bowl syndrome and any other diseases or conditions that are related to or will respond to the levels of MAP kinase in a cell or tissue, alone or in combination with other therapies. The reduction of MAP kinase expression (specifically MAP kinase gene RNA levels) and thus reduction in the level of the respective protein relieves, to some extent, the symptoms of the disease or condition.

[0178] In one embodiment of the present invention, each sequence of a siNA molecule of the invention is independently about 18 to about 24 nucleotides in length, in specific embodiments about 18, 19, 20, 21, 22, 23, or 24 nucleotides in length. In another embodiment, the siNA duplexes of the invention independently comprise about 17 to about 23 base pairs (e.g., about 17, 18, 19, 20, 21, 22 or 23). In yet another embodiment, siNA molecules of the invention comprising hairpin or circular structures are about 35 to about 55 (e.g., about 35, 40, 45, 50 or 55) nucleotides in length, or about 38 to about 44 (e.g., 38, 39, 40, 41, 42, 43 or 44) nucleotides in length and comprising about 16 to about 22 (e.g., about 16, 17, 18, 19, 20, 21 or 22) base pairs. Exemplary siNA molecules of the invention are shown in Table II. Exemplary synthetic siNA molecules of the invention are shown in Tables III and IV and/or FIGS. 4-5.

[0179] As used herein “cell” is used in its usual biological sense, and does not refer to an entire multicellular organism, e.g., specifically does not refer to a human. The cell can be present in an organism, e.g., birds, plants and mammals such as humans, cows, sheep, apes, monkeys, swine, dogs, and cats. The cell can be prokaryotic (e.g., bacterial cell) or eukaryotic (e.g., mammalian or plant cell). The cell can be of somatic or germ line origin, totipotent or pluripotent, dividing or non-dividing. The cell can also be derived from or can comprise a gamete or embryo, a stem cell, or a fully differentiated cell.

[0180] The siNA molecules of the invention are added directly, or can be complexed with cationic lipids, packaged within liposomes, or otherwise delivered to target cells or tissues. The nucleic acid or nucleic acid complexes can be locally administered to relevant tissues ex vivo, or in vivo through injection, infusion pump or stent, with or without their incorporation in biopolymers. In particular embodiments, the nucleic acid molecules of the invention comprise sequences shown in Tables II-III and/or FIGS. 4-5. Examples of such nucleic acid molecules consist essentially of sequences defined in these tables and figures. Furthermore, the chemically modified constructs described in Table IV can be applied to any siNA sequence of the invention.

[0181] In another aspect, the invention provides mammalian cells containing one or more siNA molecules of this invention. The one or more siNA molecules can independently be targeted to the same or different sites.

[0182] By “RNA” is meant a molecule comprising at least one ribonucleotide residue. By “ribonucleotide” is meant a nucleotide with a hydroxyl group at the 2′ position of a β-D-ribo-furanose moiety. The terms include double-stranded RNA, single-stranded RNA, isolated RNA such as partially purified RNA, essentially pure RNA, synthetic RNA, recombinantly produced RNA, as well as altered RNA that differs from naturally occurring RNA by the addition, deletion, substitution and/or alteration of one or more nucleotides. Such alterations can include addition of non-nucleotide material, such as to the end(s) of the siNA or internally, for example at one or more nucleotides of the RNA. Nucleotides in the RNA molecules of the instant invention can also comprise non-standard nucleotides, such as non-naturally occurring nucleotides or chemically synthesized nucleotides or deoxynucleotides. These altered RNAs can be referred to as analogs or analogs of naturally-occurring RNA.

[0183] By “subject” is meant an organism, which is a donor or recipient of explanted cells or the cells themselves. “Subject” also refers to an organism to which the nucleic acid molecules of the invention can be administered. A subject can be a mammal or mammalian cells, including a human or human cells.

[0184] The term “phosphorothioate” as used herein refers to an internucleotide linkage having Formula I, wherein Z and/or W comprise a sulfur atom. Hence, the term phosphorothioate refers to both phosphorothioate and phosphorodithioate internucleotide linkages.

[0185] The term “universal base” as used herein refers to nucleotide base analogs that form base pairs with each of the natural DNA/RNA bases with little discrimination between them. Non-limiting examples of universal bases include C-phenyl, C-naphthyl and other aromatic derivatives, inosine, azole carboxamides, and nitroazole derivatives such as 3-nitropyrrole, 4-nitroindole, 5-nitroindole, and 6-nitroindole as known in the art (see for example Loakes, 2001, Nucleic Acids Research, 29, 2437-2447).

[0186] The term “acyclic nucleotide” as used herein refers to any nucleotide having an acyclic ribose sugar, for example where any of the ribose carbons (C1, C2, C3, C4, or C5), are independently or in combination absent from the nucleotide.

[0187] The nucleic acid molecules of the instant invention, individually, or in combination or in conjunction with other drugs, can be used to treat diseases or conditions discussed herein (e.g., cancers and the proliferative conditions). For example, to treat a particular disease or condition, the siNA molecules can be administered to a subject or can be administered to other appropriate cells evident to those skilled in the art, individually or in combination with one or more drugs under conditions suitable for the treatment.

[0188] In a further embodiment, the siNA molecules can be used in combination with other known treatments to treat conditions or diseases discussed above. For example, the described molecules could be used in combination with one or more known therapeutic agents to treat a disease or condition. Non-limiting examples of other therapeutic agents that can be readily combined with a siNA molecule of the invention are enzymatic nucleic acid molecules, allosteric nucleic acid molecules, antisense, decoy, or aptamer nucleic acid molecules, antibodies such as monoclonal antibodies, small molecules, and other organic and/or inorganic compounds including metals, salts and ions.

[0189] In one embodiment, the invention features an expression vector comprising a nucleic acid sequence encoding at least one siNA molecule of the invention, in a manner which allows expression of the siNA molecule. For example, the vector can contain sequence(s) encoding both strands of a siNA molecule comprising a duplex. The vector can also contain sequence(s) encoding a single nucleic acid molecule that is self-complementary and thus forms a siNA molecule. Non-limiting examples of such expression vectors are described in Paul et al., 2002, Nature Biotechnology, 19, 505; Miyagishi and Taira, 2002, Nature Biotechnology, 19, 497; Lee et al., 2002, Nature Biotechnology, 19, 500; and Novina et al., 2002, Nature Medicine, advance online publication doi:10.1038/nm725.

[0190] In another embodiment, the invention features a mammalian cell, for example, a human cell, including an expression vector of the invention.

[0191] In yet another embodiment, the expression vector of the invention comprises a sequence for a siNA molecule having complementarity to a RNA molecule referred to by a Genbank Accession numbers, for example Genbank Accession Nos. shown in Table I.

[0192] In one embodiment, an expression vector of the invention comprises a nucleic acid sequence encoding two or more siNA molecules, which can be the same or different.

[0193] In another aspect of the invention, siNA molecules that interact with target RNA molecules and down-regulate gene encoding target RNA molecules (for example target RNA molecules referred to by Genbank Accession numbers herein) are expressed from transcription units inserted into DNA or RNA vectors. The recombinant vectors can be DNA plasmids or viral vectors. siNA expressing viral vectors can be constructed based on, but not limited to, adeno-associated virus, retrovirus, adenovirus, or alphavirus. The recombinant vectors capable of expressing the siNA molecules can be delivered as described herein, and persist in target cells. Alternatively, viral vectors can be used that provide for transient expression of siNA molecules. Such vectors can be repeatedly administered as necessary. Once expressed, the siNA molecules bind and down-regulate gene function or expression via RNA interference (RNAi). Delivery of siNA expressing vectors can be systemic, such as by intravenous or intramuscular administration, by administration to target cells ex-planted from a subject followed by reintroduction into the subject, or by any other means that would allow for introduction into the desired target cell.

[0194] By “vectors” is meant any nucleic acid- and/or viral-based technique used to deliver a desired nucleic acid.

[0195] Other features and advantages of the invention will be apparent from the following description of the preferred embodiments thereof, and from the claims.

### BRIEF DESCRIPTION OF THE DRAWINGS

[0196] FIG. 1 shows a non-limiting example of a scheme for the synthesis of siNA molecules. The complementary siNA sequence strands, strand 1 and strand 2, are synthesized in tandem and are connected by a cleavable linkage, such as a nucleotide succinate or abasic succinate, which can be the same or different from the cleavable linker used for solid phase synthesis on a solid support. The synthesis can be either solid phase or solution phase, in the example shown, the synthesis is a solid phase synthesis. The synthesis is performed such that a protecting group, such as a dimethoxytrityl group, remains intact on the terminal nucleotide of the tandem oligonucleotide. Upon cleavage and deprotection of the oligonucleotide, the two siNA strands spontaneously hybridize to form a siNA duplex, which allows the purification of the duplex by utilizing the properties of the terminal protecting group, for example by applying a trityl on purification method wherein only duplexes/oligonucleotides with the terminal protecting group are isolated.

[0197] FIG. 2 shows a MALDI-TOF mass spectrum of a purified siNA duplex synthesized by a method of the invention. The two peaks shown correspond to the predicted mass of the separate siNA sequence strands. This result demonstrates that the siNA duplex generated from tandem synthesis can be purified as a single entity using a simple trityl-on purification methodology.

[0198] FIG. 3 shows a non-limiting proposed mechanistic representation of target RNA degradation involved in RNAi. Double-stranded RNA (dsRNA), which is generated by RNA-dependent RNA polymerase (RdRP) from foreign single-stranded RNA, for example viral, transposon, or other exogenous RNA, activates the DICER enzyme that in turn generates siNA duplexes. Alternately, synthetic or expressed siNA can be introduced directly into a cell by appropriate means. An active siNA complex forms which recognizes a target RNA, resulting in degradation of the target RNA by the RISC endonuclease complex or in the synthesis of additional RNA by RNA-dependent RNA polymerase (RdRP), which can activate DICER and result in additional siNA molecules, thereby amplifying the RNAi response.

[0199] FIG. 4A-F shows non-limiting examples of chemically-modified siNA constructs of the present invention. In the figure, N stands for any nucleotide (adenosine, guanosine, cytosine, uridine, or optionally thymidine, for example thymidine can be substituted in the overhanging regions designated by parenthesis (N N). Various modifications are shown for the sense and antisense strands of the siNA constructs.

[0200] FIG. 4A: The sense strand comprises 21 nucleotides wherein the two terminal 3′-nucleotides are optionally base paired and wherein all nucleotides present are ribonucleotides except for (N N) nucleotides, which can comprise ribonucleotides, deoxynucleotides, universal bases, or other chemical modifications described herein. The antisense strand comprises 21 nucleotides, optionally having a 3′-terminal glyceryl moiety and wherein the two terminal 3′-nucleotides are optionally complementary to the target RNA sequence, and wherein all nucleotides present are ribonucleotides except for (N N) nucleotides, which can comprise ribonucleotides, deoxynucleotides, universal bases, or other chemical modifications described herein. A modified internucleotide linkage, such as a phosphorothioate, phosphorodithioate or other modified internucleotide linkage as described herein, shown as “s” connects the (N N) nucleotides in the antisense strand.

[0201] FIG. 4B: The sense strand comprises 21 nucleotides wherein the two terminal 3′-nucleotides are optionally base paired and wherein all pyrimidine nucleotides that may be present are 2′-deoxy-2′-fluoro modified nucleotides and all purine nucleotides that may be present are 2′-O-methyl modified nucleotides except for (N N) nucleotides, which can comprise ribonucleotides, deoxynucleotides, universal bases, or other chemical modifications described herein. The antisense strand comprises 21 nucleotides, optionally having a 3′-terminal glyceryl moiety and wherein the two terminal 3′-nucleotides are optionally complementary to the target RNA sequence, and wherein all pyrimidine nucleotides that may be present are 2′-deoxy-2′-fluoro modified nucleotides and all purine nucleotides that may be present are 2′-O-methyl modified nucleotides except for (N N) nucleotides, which can comprise ribonucleotides, deoxynucleotides, universal bases, or other chemical modifications described herein. A modified internucleotide linkage, such as a phosphorothioate, phosphorodithioate or other modified internucleotide linkage as described herein, shown as “s” connects the (N N) nucleotides in the sense and antisense strand.

[0202] FIG. 4C: The sense strand comprises 21 nucleotides having 5′- and 3′-terminal cap moieties wherein the two terminal 3′-nucleotides are optionally base paired and wherein all pyrimidine nucleotides that may be present are 2′-O-methyl or 2′-deoxy-2′-fluoro modified nucleotides except for (N N) nucleotides, which can comprise ribonucleotides, deoxynucleotides, universal bases, or other chemical modifications described herein. The antisense strand comprises 21 nucleotides, optionally having a 3′-terminal glyceryl moiety and wherein the two terminal 3′-nucleotides are optionally complementary to the target RNA sequence, and wherein all pyrimidine nucleotides that may be present are 2′-deoxy-2′-fluoro modified nucleotides except for (N N) nucleotides, which can comprise ribonucleotides, deoxynucleotides, universal bases, or other chemical modifications described herein. A modified internucleotide linkage, such as a phosphorothioate, phosphorodithioate or other modified internucleotide linkage as described herein, shown as “s” connects the (N N) nucleotides in the antisense strand.

[0203] FIG. 4D: The sense strand comprises 21 nucleotides having 5′- and 3′-terminal cap moieties wherein the two terminal 3′-nucleotides are optionally base paired and wherein all pyrimidine nucleotides that may be present are 2′-deoxy-2′-fluoro modified nucleotides except for (N N) nucleotides, which can comprise ribonucleotides, deoxynucleotides, universal bases, or other chemical modifications described herein and wherein and all purine nucleotides that may be present are 2′-deoxy nucleotides. The antisense strand comprises 21 nucleotides, optionally having a 3′-terminal glyceryl moiety and wherein the two terminal 3′-nucleotides are optionally complementary to the target RNA sequence, and wherein all pyrimidine nucleotides that may be present are 2′-deoxy-2′-fluoro modified nucleotides and all purine nucleotides that may be present are 2′-O-methyl modified nucleotides except for (N N) nucleotides, which can comprise ribonucleotides, deoxynucleotides, universal bases, or other chemical modifications described herein. A modified internucleotide linkage, such as a phosphorothioate, phosphorodithioate or other modified internucleotide linkage as described herein, shown as “s” connects the (N N) nucleotides in the antisense strand.

[0204] FIG. 4E: The sense strand comprises 21 nucleotides having 5′- and 3′-terminal cap moieties wherein the two terminal 3′-nucleotides are optionally base paired and wherein all pyrimidine nucleotides that may be present are 2′-deoxy-2′-fluoro modified nucleotides except for (N N) nucleotides, which can comprise ribonucleotides, deoxynucleotides, universal bases, or other chemical modifications described herein. The antisense strand comprises 21 nucleotides, optionally having a 3′-terminal glyceryl moiety and wherein the two terminal 3′-nucleotides are optionally complementary to the target RNA sequence, and wherein all pyrimidine nucleotides that may be present are 2′-deoxy-2′-fluoro modified nucleotides and all purine nucleotides that may be present are 2′-O-methyl modified nucleotides except for (N N) nucleotides, which can comprise ribonucleotides, deoxynucleotides, universal bases, or other chemical modifications described herein. A modified internucleotide linkage, such as a phosphorothioate, phosphorodithioate or other modified internucleotide linkage as described herein, shown as “s” connects the (N N) nucleotides in the antisense strand.

[0205] FIG. 4F: The sense strand comprises 21 nucleotides having 5′- and 3′-terminal cap moieties wherein the two terminal 3′-nucleotides are optionally base paired and wherein all pyrimidine nucleotides that may be present are 2′-deoxy-2′-fluoro modified nucleotides except for (N N) nucleotides, which can comprise ribonucleotides, deoxynucleotides, universal bases, or other chemical modifications described herein and wherein and all purine nucleotides that may be present are 2′-deoxy nucleotides. The antisense strand comprises 21 nucleotides, optionally having a 3′-terminal glyceryl moiety and wherein the two terminal 3′-nucleotides are optionally complementary to the target RNA sequence, and wherein all pyrimidine nucleotides that may be present are 2′-deoxy-2′-fluoro modified nucleotides and all purine nucleotides that may be present are 2′-deoxy nucleotides except for (N N) nucleotides, which can comprise ribonucleotides, deoxynucleotides, universal bases, or other chemical modifications described herein. A modified internucleotide linkage, such as a phosphorothioate, phosphorodithioate or other modified internucleotide linkage as described herein, shown as “s” connects the (N N) nucleotides in the antisense strand. The antisense strand of constructs A-F comprise sequence complementary to any target nucleic acid sequence of the invention. Furthermore, when a glyceryl moiety (L) is present at the 3′-end of the antisense strand for any construct shown in FIG. 4A-F, the modified internucleotide linkage is optional.

[0206] FIG. 5A-F shows non-limiting examples of specific chemically-modified siNA sequences of the invention. A-F applies the chemical modifications described in FIG. 4A-F to a c-JUN siNA sequence. Such chemical modifications can be applied to any sequence herein, such as any MAP kinase sequence.

[0207] FIG. 6 shows non-limiting examples of different siNA constructs of the invention. The examples shown (constructs 1, 2, and 3) have 19 representative base pairs; however, different embodiments of the invention include any number of base pairs described herein. Bracketed regions represent nucleotide overhangs, for example comprising about 1, 2, 3, or 4 nucleotides in length, preferably about 2 nucleotides. Constructs 1 and 2 can be used independently for RNAi activity. Construct 2 can comprise a polynucleotide or non-nucleotide linker, which can optionally be designed as a biodegradable linker. In one embodiment, the loop structure shown in construct 2 can comprise a biodegradable linker that results in the formation of construct 1 in vivo and/or in vitro. In another example, construct 3 can be used to generate construct 2 under the same principle wherein a linker is used to generate the active siNA construct 2 in vivo and/or in vitro, which can optionally utilize another biodegradable linker to generate the active siNA construct 1 in vivo and/or in vitro. As such, the stability and/or activity of the siNA constructs can be modulated based on the design of the siNA construct for use in vivo or in vitro and/or in vitro.

[0208] FIG. 7A-C is a diagrammatic representation of a scheme utilized in generating an expression cassette to generate siNA hairpin constructs.

[0209] FIG. 7A: A DNA oligomer is synthesized with a 5′-restriction site (R1) sequence followed by a region having sequence identical (sense region of siNA) to a predetermined MAP kinase target sequence, wherein the sense region comprises, for example, about 19, 20, 21, or 22 nucleotides (N) in length, which is followed by a loop sequence of defined sequence (X), comprising, for example, about 3 to about 10 nucleotides.

[0210] FIG. 7B: The synthetic construct is then extended by DNA polymerase to generate a hairpin structure having self-complementary sequence that will result in a siNA transcript having specificity for a MAP kinase target sequence and having self-complementary sense and antisense regions.

[0211] FIG. 7C: The construct is heated (for example to about 95° C.) to linearize the sequence, thus allowing extension of a complementary second DNA strand using a primer to the 3′-restriction sequence of the first strand. The double-stranded DNA is then inserted into an appropriate vector for expression in cells. The construct can be designed such that a 3′-terminal nucleotide overhang results from the transcription, for example by engineering restriction sites and/or utilizing a poly-U termination region as described in Paul et al., 2002, Nature Biotechnology, 29, 505-508.

[0212] FIG. 8A-C is a diagrammatic representation of a scheme utilized in generating an expression cassette to generate double-stranded siNA constructs.

[0213] FIG. 8A: A DNA oligomer is synthesized with a 5′-restriction (R1) site sequence followed by a region having sequence identical (sense region of siNA) to a predetermined MAP kinase target sequence, wherein the sense region comprises, for example, about 19, 20, 21, or 22 nucleotides (N) in length, and which is followed by a 3′-restriction site (R2) which is adjacent to a loop sequence of defined sequence (X).

[0214] FIG. 8B: The synthetic construct is then extended by DNA polymerase to generate a hairpin structure having self-complementary sequence.

[0215] FIG. 8C: The construct is processed by restriction enzymes specific to R1 and R2 to generate a double-stranded DNA which is then inserted into an appropriate vector for expression in cells. The transcription cassette is designed such that a U6 promoter region flanks each side of the dsDNA which generates the separate sense and antisense strands of the siNA. Poly T termination sequences can be added to the constructs to generate U overhangs in the resulting transcript.

[0216] FIG. 9A-E is a diagrammatic representation of a method used to determine target sites for siNA mediated RNAi within a particular target nucleic acid sequence, such as messenger RNA.

[0217] FIG. 9A: A pool of siNA oligonucleotides are synthesized wherein the antisense region of the siNA constructs has complementarity to target sites across the target nucleic acid sequence, and wherein the sense region comprises sequence complementary to the antisense region of the siNA.

[0218] FIGS. 9B & C: (FIG. 9B) The sequences are pooled and are inserted into vectors such that (FIG. 9C) transfection of a vector into cells results in the expression of the siNA.

[0219] FIG. 9D: Cells are sorted based on phenotypic change that is associated with modulation of the target nucleic acid sequence.

[0220] FIG. 9E: The siNA is isolated from the sorted cells and is sequenced to identify efficacious target sites within the target nucleic acid sequence.

[0221] FIG. 10 shows non-limiting examples of different stabilization chemistries (1-10) that can be used, for example, to stabilize the 3′-end of siNA sequences of the invention, including (1) [3-3′]-inverted deoxyribose; (2) deoxyribonucleotide; (3) [5′-3′]-3′ -deoxyribonucleotide; (4) [5′-3′]-ribonucleotide; (5) [5′-3′]-3′-O-methyl ribonucleotide; (6) 3′ -glyceryl; (7) [3′-5′]-3′-deoxyribonucleotide; (8) [3′-3′]-deoxyribonucleotide; (9) [5′-2′]-deoxyribonucleotide; and (10) [5-3′]-dideoxyribonucleotide. In addition to modified and unmodified backbone chemistries indicated in the figure, these chemistries can be combined with different backbone modifications as described herein, for example, backbone modifications having Formula I. In addition, the 2′-deoxy nucleotide shown 5′ to the terminal modifications shown can be another modified or unmodified nucleotide or non-nucleotide described herein, for example modifications having any of Formulae I-VII or any combination thereof.

[0222] FIG. 11 shows a non-limiting example of a strategy used to identify chemically modified siNA constructs of the invention that are nuclease resistance while preserving the ability to mediate RNAi activity. Chemical modifications are introduced into the siNA construct based on educated design parameters (e.g. introducing 2′-modifications, base modifications, backbone modifications, terminal cap modifications etc). The modified construct in tested in an appropriate system (e.g. human serum for nuclease resistance, shown, or an animal model for PK/delivery parameters). In parallel, the siNA construct is tested for RNAi activity, for example in a cell culture system such as a luciferase reporter assay). Lead siNA constructs are then identified which possess a particular characteristic while maintaining RNAi activity, and can be further modified and assayed once again. This same approach can be used to identify siNA-conjugate molecules with improved pharmacokinetic profiles, delivery, and RNAi activity.

[0223] FIG. 12 shows a non-limiting example of reduction of p38 mRNA in A549 cells mediated by siNAs that target p38 mRNA. A549 cells were transfected with 0.25 ug/well of lipid complexed with 25 nM siNA. A screen of siNA constructs comprising ribonucleotides and 3′-terminal dithymidine caps was compared to untreated cells, scrambled siNA control constructs (Scram1 and Scram2), and cells transfected with lipid alone (transfection control). As shown in the figure, the siNA constructs significantly reduce p38 RNA expression.

[0224] FIG. 13 shows a non-limiting example of reduction of JNK1 mRNA in A549 cells mediated by siNAs that target JNK1 mRNA. A549 cells were transfected with 0.25 ug/well of lipid complexed with 25 nM siNA. A screen of siNA constructs comprising ribonucleotides and 3′-terminal dithymidine caps was compared to untreated cells, scrambled siNA control constructs (Scram1 and Scram2), and cells transfected with lipid alone (transfection control). As shown in the figure, the siNA constructs significantly reduce JNK1 RNA expression.

### DETAILED DESCRIPTION OF THE INVENTION

Mechanism of Action of Nucleic Acid Molecules of the Invention

[0225] The discussion that follows discusses the proposed mechanism of RNA interference mediated by short interfering RNA as is presently known, and is not meant to be limiting and is not an admission of prior art. Applicant demonstrates herein that chemically-modified short interfering nucleic acids possess similar or improved capacity to mediate RNAi as do siRNA molecules and are expected to possess improved stability and activity in vivo; therefore, this discussion is not meant to be limited to siRNA only and can be applied to siNA as a whole. By “improved capacity to mediate RNAi” or “improved RNAi activity” is meant to include RNAi activity measured in vitro and/or in vivo where the RNAi activity is a reflection of both the ability of the siNA to mediate RNAi and the stability of the siNAs of the invention. In this invention, the product of these activities can be increased in vitro and/or in vivo compared to an all RNA siRNA or a siNA containing a plurality of ribonucleotides. In some cases, the activity or stability of the siNA molecule can be decreased (i.e., less than ten-fold), but the overall activity of the siNA molecule is enhanced in vitro and/or in vivo.

[0226] RNA interference refers to the process of sequence specific post-transcriptional gene silencing in animals mediated by short interfering RNAs (siRNAs) (Fire et al., 1998, Nature, 391, 806). The corresponding process in plants is commonly referred to as post-transcriptional gene silencing or RNA silencing and is also referred to as quelling in fungi. The process of post-transcriptional gene silencing is thought to be an evolutionarily-conserved cellular defense mechanism used to prevent the expression of foreign genes which is commonly shared by diverse flora and phyla (Fire et al., 1999, Trends Genet., 15, 358). Such protection from foreign gene expression may have evolved in response to the production of double-stranded RNAs (dsRNAs) derived from viral infection or the random integration of transposon elements into a host genome via a cellular response that specifically destroys homologous single-stranded RNA or viral genomic RNA. The presence of dsRNA in cells triggers the RNAi response though a mechanism that has yet to be fully characterized. This mechanism appears to be different from the interferon response that results from dsRNA-mediated activation of protein kinase PKR and 2′, 5′-oligoadenylate synthetase resulting in non-specific cleavage of mRNA by ribonuclease L.

[0227] The presence of long dsRNAs in cells stimulates the activity of a ribonuclease III enzyme referred to as Dicer. Dicer is involved in the processing of the dsRNA into short pieces of dsRNA known as short interfering RNAs (siRNAs) (Berstein et al., 2001, Nature, 409, 363). Short interfering RNAs derived from Dicer activity are typically about 21 to about 23 nucleotides in length and comprise about 19 base pair duplexes. Dicer has also been implicated in the excision of 21- and 22-nucleotide small temporal RNAs (stRNAs) from precursor RNA of conserved structure that are implicated in translational control (Hutvagner et al., 2001, Science, 293, 834). The RNAi response also features an endonuclease complex containing a siRNA, commonly referred to as an RNA-induced silencing complex (RISC), which mediates cleavage of single-stranded RNA having sequence homologous to the siRNA. Cleavage of the target RNA takes place in the middle of the region complementary to the guide sequence of the siRNA duplex (Elbashir et al., 2001, Genes Dev., 15, 188). In addition, RNA interference can also involve small RNA (e.g., micro-RNA or miRNA) mediated gene silencing, presumably though cellular mechanisms that regulate chromatin structure and thereby prevent transcription of target gene sequences (see for example Allshire, 2002, Science, 297, 1818-1819; Volpe et al., 2002, Science, 297, 1833-1837; Jenuwein, 2002, Science, 297, 2215-2218; and Hall et al., 2002, Science, 297, 2232-2237). As such, siNA molecules of the invention can be used to mediate gene silencing via interaction with RNA transcripts or alternately by interaction with particular gene sequences, wherein such interaction results in gene silencing either at the transcriptional level or post-transcriptional level.

[0228] RNAi has been studied in a variety of systems. Fire et al., 1998, Nature, 391, 806, were the first to observe RNAi in C. elegans. Wianny and Goetz, 1999, Nature Cell Biol., 2, 70, describe RNAi mediated by dsRNA in mouse embryos. Hammond et al., 2000, Nature, 404, 293, describe RNAi in Drosophila cells transfected with dsRNA. Elbashir et al., 2001, Nature, 411, 494, describe RNAi induced by introduction of duplexes of synthetic 21-nucleotide RNAs in cultured mammalian cells including human embryonic kidney and HeLa cells. Recent work in Drosophila embryonic lysates has revealed certain requirements for siRNA length, structure, chemical composition, and sequence that are essential to mediate efficient RNAi activity. These studies have shown that 21 nucleotide siRNA duplexes are most active when containing two 2-nucleotide 3′-terminal nucleotide overhangs. Furthermore, substitution of one or both siRNA strands with 2′-deoxy or 2′-O-methyl nucleotides abolishes RNAi activity, whereas substitution of 3′-terminal siRNA nucleotides with deoxy nucleotides was shown to be tolerated. Mismatch sequences in the center of the siRNA duplex were also shown to abolish RNAi activity. In addition, these studies also indicate that the position of the cleavage site in the target RNA is defined by the 5′-end of the siRNA guide sequence rather than the 3′-end (Elbashir et al., 2001, EMBO J., 20, 6877). Other studies have indicated that a 5′-phosphate on the target-complementary strand of a siRNA duplex is required for siRNA activity and that ATP is utilized to maintain the 5′-phosphate moiety on the siRNA (Nykanen et al., 2001, Cell, 107, 309); however, siRNA molecules lacking a 5′-phosphate are active when introduced exogenously, suggesting that 5′-phosphorylation of siRNA constructs may occur in vivo.

Synthesis of Nucleic Acid Molecules

[0229] Synthesis of nucleic acids greater than 100 nucleotides in length is difficult using automated methods, and the therapeutic cost of such molecules is prohibitive. In this invention, small nucleic acid motifs (“small” refers to nucleic acid motifs no more than 100 nucleotides in length, preferably no more than 80 nucleotides in length, and most preferably no more than 50 nucleotides in length; e.g., individual siNA oligonucleotide sequences or siNA sequences synthesized in tandem) are preferably used for exogenous delivery. The simple structure of these molecules increases the ability of the nucleic acid to invade targeted regions of protein and/or RNA structure. Exemplary molecules of the instant invention are chemically synthesized, and others can similarly be synthesized.

[0230] Oligonucleotides (e.g., certain modified oligonucleotides or portions of oligonucleotides lacking ribonucleotides) are synthesized using protocols known in the art, for example as described in Caruthers et al., 1992, Methods in Enzymology 211, 3-19, Thompson et al., International PCT Publication No. WO 99/54459, Wincott et al., 1995, Nucleic Acids Res. 23, 2677-2684, Wincott et al., 1997, Methods Mol. Bio., 74, 59, Brennan et al., 1998, Biotechnol Bioeng., 61, 33-45, and Brennan, U.S. Pat. No. 6,001,311. All of these references are incorporated herein by reference. The synthesis of oligonucleotides makes use of common nucleic acid protecting and coupling groups, such as dimethoxytrityl at the 5′-end, and phosphoramidites at the 3′-end. In a non-limiting example, small scale syntheses are conducted on a 394 Applied Biosystems, Inc. synthesizer using a 0.2 μmol scale protocol with a 2.5 minute coupling step for 2′-O-methylated nucleotides and a 45 second coupling step for 2′-deoxy nucleotides or 2′-deoxy-2′-fluoro nucleotides. Table V outlines the amounts and the contact times of the reagents used in the synthesis cycle. Alternatively, syntheses at the 0.2 μmol scale can be performed on a 96-well plate synthesizer, such as the instrument produced by Protogene (Palo Alto, Calif.) with minimal modification to the cycle. A 33-fold excess (60 μL of 0.11 M=6.6 μmol) of 2′-O-methyl phosphoramidite and a 105-fold excess of S-ethyl tetrazole (60 μL of 0.25 M=15 μmol) can be used in each coupling cycle of 2′-O-methyl residues relative to polymer-bound 5′ -hydroxyl. A 22-fold excess (40 μL of 0.11 M=4.4 μmol) of deoxy phosphoramidite and a 70-fold excess of S-ethyl tetrazole (40 μL of 0.25 M=10 μmol) can be used in each coupling cycle of deoxy residues relative to polymer-bound 5′-hydroxyl. Average coupling yields on the 394 Applied Biosystems, Inc. synthesizer, determined by colorimetric quantitation of the trityl fractions, are typically 97.5-99%. Other oligonucleotide synthesis reagents for the 394 Applied Biosystems, Inc. synthesizer include the following: detritylation solution is 3% TCA in methylene chloride (ABI); capping is performed with 16% N-methyl imidazole in THF (ABI) and 10% acetic anhydride/10% 2,6-lutidine in THF (ABI); and oxidation solution is 16.9 mM I₂, 49 mM pyridine, 9% water in THF (PERSEPTIVE™). Burdick & Jackson Synthesis Grade acetonitrile is used directly from the reagent bottle. S-Ethyltetrazole solution (0.25 M in acetonitrile) is made up from the solid obtained from American International Chemical, Inc. Alternately, for the introduction of phosphorothioate linkages, Beaucage reagent (3H-1,2-Benzodithiol-3-one 1,1-dioxide, 0.05 M in acetonitrile) is used.

[0231] Deprotection of the DNA-based oligonucleotides is performed as follows: the polymer-bound trityl-on oligoribonucleotide is transferred to a 4 mL glass screw top vial and suspended in a solution of 40% aqueous methylamine (1 mL) at 65° C. for 10 minutes. After cooling to −20° C., the supernatant is removed from the polymer support. The support is washed three times with 1.0 mL of EtOH:MeCN:H20/3:1:1, vortexed and the supernatant is then added to the first supernatant. The combined supernatants, containing the oligoribonucleotide, are dried to a white powder.

[0232] The method of synthesis used for RNA including certain siNA molecules of the invention follows the procedure as described in Usman et al., 1987, J. Am. Chem. Soc., 109, 7845; Scaringe et al., 1990, Nucleic Acids Res., 18, 5433; and Wincott et al., 1995, Nucleic Acids Res. 23, 2677-2684 Wincott et al., 1997, Methods Mol. Bio., 74, 59, and makes use of common nucleic acid protecting and coupling groups, such as dimethoxytrityl at the 5′-end, and phosphoramidites at the 3′-end. In a non-limiting example, small scale syntheses are conducted on a 394 Applied Biosystems, Inc. synthesizer using a 0.2 μmol scale protocol with a 7.5 minute coupling step for alkylsilyl protected nucleotides and a 2.5 minute coupling step for 2′-O-methylated nucleotides. Table V outlines the amounts and the contact times of the reagents used in the synthesis cycle. Alternatively, syntheses at the 0.2 μmol scale can be done on a 96-well plate synthesizer, such as the instrument produced by Protogene (Palo Alto, Calif.) with minimal modification to the cycle. A 33-fold excess (60 μL of 0.11 M=6.6 μmol) of 2′-O-methyl phosphoramidite and a 75-fold excess of S-ethyl tetrazole (60 μL of 0.25 M=15 μmol) can be used in each coupling cycle of 2′-O-methyl residues relative to polymer-bound 5′-hydroxyl. A 66-fold excess (120 μL of 0.11 M=13.2 μmol) of alkylsilyl (ribo) protected phosphoramidite and a 150-fold excess of S-ethyl tetrazole (120 μL of 0.25 M=30 μmol) can be used in each coupling cycle of ribo residues relative to polymer-bound 5′-hydroxyl. Average coupling yields on the 394 Applied Biosystems, Inc. synthesizer, determined by colorimetric quantitation of the trityl fractions, are typically 97.5-99%. Other oligonucleotide synthesis reagents for the 394 Applied Biosystems, Inc. synthesizer include the following: detritylation solution is 3% TCA in methylene chloride (ABI); capping is performed with 16% N-methyl imidazole in THF (ABI) and 10% acetic anhydride/10% 2,6-lutidine in THF (ABI); oxidation solution is 16.9 mM I₂, 49 mM pyridine, 9% water in THF (PERSEPTIVE™). Burdick & Jackson Synthesis Grade acetonitrile is used directly from the reagent bottle. S-Ethyltetrazole solution (0.25 M in acetonitrile) is made up from the solid obtained from American International Chemical, Inc. Alternately, for the introduction of phosphorothioate linkages, Beaucage reagent (3H-1,2-Benzodithiol-3-one 1,1-dioxide 0.05 M in acetonitrile) is used.

[0233] Deprotection of the RNA is performed using either a two-pot or one-pot protocol. For the two-pot protocol, the polymer-bound trityl-on oligoribonucleotide is transferred to a 4 mL glass screw top vial and suspended in a solution of 40% aq. methylamine (1 mL) at 65° C. for 10 minutes. After cooling to −20° C., the supernatant is removed from the polymer support. The support is washed three times with 1.0 mL of EtOH:MeCN:H20/3:1:1, vortexed and the supernatant is then added to the first supernatant. The combined supernatants, containing the oligoribonucleotide, are dried to a white powder. The base deprotected oligoribonucleotide is resuspended in anhydrous TEA/HF/NMP solution (300 μL of a solution of 1.5 mL N-methylpyrrolidinone, 750 μL TEA and 1 mL TEA.3HF to provide a 1.4 M HF concentration) and heated to 65° C. After 1.5 hours, the oligomer is quenched with 1.5 M NH₄HCO₃.

[0234] Alternatively, for the one-pot protocol, the polymer-bound trityl-on oligoribonucleotide is transferred to a 4 mL glass screw top vial and suspended in a solution of 33% ethanolic methylamine/DMSO: 1/1 (0.8 mL) at 65° C. for 15 minutes. The vial is brought to room temperature. TEA.3HF (0.1 mL) is added and the vial is heated at 65° C. for 15 minutes. The sample is cooled at −20° C. and then quenched with 1.5 M NH₄HCO₃.

[0235] For purification of the trityl-on oligomers, the quenched NH₄HCO₃ solution is loaded onto a C-18 containing cartridge that had been prewashed with acetonitrile followed by 50 mM TEAA. After washing the loaded cartridge with water, the RNA is detritylated with 0.5% TFA for 13 minutes. The cartridge is then washed again with water, salt exchanged with 1 M NaCl and washed with water again. The oligonucleotide is then eluted with 30% acetonitrile.

[0236] The average stepwise coupling yields are typically>98% (Wincott et al., 1995 Nucleic Acids Res. 23, 2677-2684). Those of ordinary skill in the art will recognize that the scale of synthesis can be adapted to be larger or smaller than the example described above including but not limited to 96-well format.

[0237] Alternatively, the nucleic acid molecules of the present invention can be synthesized separately and joined together post-synthetically, for example, by ligation (Moore et al., 1992, Science 256, 9923; Draper et al., International PCT publication No. WO 93/23569; Shabarova et al., 1991, Nucleic Acids Research 19, 4247; Bellon et al., 1997, Nucleosides & Nucleotides, 16, 951; Bellon et al., 1997, Bioconjugate Chem. 8, 204), or by hybridization following synthesis and/or deprotection.

[0238] The siNA molecules of the invention can also be synthesized via a tandem synthesis methodology as described in Example 1 herein, wherein both siNA strands are synthesized as a single contiguous oligonucleotide fragment or strand separated by a cleavable linker which is subsequently cleaved to provide separate siNA fragments or strands that hybridize and permit purification of the siNA duplex. The linker can be a polynucleotide linker or a non-nucleotide linker. The tandem synthesis of siNA as described herein can be readily adapted to both multiwell/multiplate synthesis platforms such as 96 well or similarly larger multi-well platforms. The tandem synthesis of siNA as described herein can also be readily adapted to large scale synthesis platforms employing batch reactors, synthesis columns and the like.

[0239] A siNA molecule can also be assembled from two distinct nucleic acid strands or fragments wherein one fragment includes the sense region and the second fragment includes the antisense region of the RNA molecule.

[0240] The nucleic acid molecules of the present invention can be modified extensively to enhance stability by modification with nuclease resistant groups, for example, 2′-amino, 2′ -C-allyl, 2′-fluoro, 2′-O-methyl, 2′-H (for a review see Usman and Cedergren, 1992, TIBS 17, 34; Usman et al., 1994, Nucleic Acids Symp. Ser. 31, 163). siNA constructs can be purified by gel electrophoresis using general methods or can be purified by high pressure liquid chromatography (HPLC; see Wincott et al., supra, the totality of which is hereby incorporated herein by reference) and re-suspended in water.

[0241] In another aspect of the invention, siNA molecules of the invention are expressed from transcription units inserted into DNA or RNA vectors. The recombinant vectors can be DNA plasmids or viral vectors. siNA expressing viral vectors can be constructed based on, but not limited to, adeno-associated virus, retrovirus, adenovirus, or alphavirus. The recombinant vectors capable of expressing the siNA molecules can be delivered as described herein, and persist in target cells. Alternatively, viral vectors can be used that provide for transient expression of siNA molecules.

Optimizing Activity of the Nucleic Acid Molecule of the Invention

[0242] Chemically synthesizing nucleic acid molecules with modifications (base, sugar and/or phosphate) can prevent their degradation by serum ribonucleases, which can increase their potency (see e.g., Eckstein et al., International Publication No. WO 92/07065; Perrault et al., 1990 Nature 344, 565; Pieken et al., 1991, Science 253, 314; Usman and Cedergren, 1992, Trends in Biochem. Sci. 17, 334; Usman et al., International Publication No. WO 93/15187; and Rossi et al., International Publication No. WO 91/03162; Sproat, U.S. Pat. No. 5,334,711; Gold et al., U.S. Pat. No. 6,300,074; and Burgin et al., supra; all of which are incorporated by reference herein). All of the above references describe various chemical modifications that can be made to the base, phosphate and/or sugar moieties of the nucleic acid molecules described herein. Modifications that enhance their efficacy in cells, and removal of bases from nucleic acid molecules to shorten oligonucleotide synthesis times and reduce chemical requirements are desired.

[0243] There are several examples in the art describing sugar, base and phosphate modifications that can be introduced into nucleic acid molecules with significant enhancement in their nuclease stability and efficacy. For example, oligonucleotides are modified to enhance stability and/or enhance biological activity by modification with nuclease resistant groups, for example, 2′-amino, 2′-C-allyl, 2′-fluoro, 2′-O-methyl, 2′-O-allyl, 2′-H, nucleotide base modifications (for a review see Usman and Cedergren, 1992, TIBS. 17, 34; Usman et al., 1994, Nucleic Acids Symp. Ser. 31, 163; Burgin et al., 1996, Biochemistry, 35, 14090). Sugar modification of nucleic acid molecules have been extensively described in the art (see Eckstein et al., International Publication PCT No. WO 92/07065; Perrault et al. Nature, 1990, 344, 565-568; Pieken et al., Science, 1991, 253, 314-317; Usman and Cedergren, Trends in Biochem. Sci. , 1992, 17, 334-339; Usman et al. International Publication PCT No. WO 93/15187; Sproat, U.S. Pat. No. 5,334,711 and Beigelman et al., 1995, J. Biol. Chem., 270, 25702; Beigelman et al., International PCT publication No. WO 97/26270; Beigelman et al., U.S. Pat. No. 5,716,824; Usman et al., U.S. Pat. No. 5,627,053; Woolf et al., International PCT Publication No. WO 98/13526; Thompson et al., U.S. Ser. No. 60/082,404 which was filed on Apr. 20, 1998; Karpeisky et al., 1998, Tetrahedron Lett., 39, 1131; Earnshaw and Gait, 1998, Biopolymers (Nucleic Acid Sciences), 48, 39-55; Verma and Eckstein, 1998, Annu. Rev. Biochem., 67, 99-134; and Burlina et al., 1997, Bioorg. Med. Chem., 5, 1999-2010; all of the references are hereby incorporated in their totality by reference herein). Such publications describe general methods and strategies to determine the location of incorporation of sugar, base and/or phosphate modifications and the like into nucleic acid molecules without modulating catalysis, and are incorporated by reference herein. In view of such teachings, similar modifications can be used as described herein to modify the siNA nucleic acid molecules of the instant invention so long as the ability of siNA to promote RNAi is cells is not significantly inhibited.

[0244] While chemical modification of oligonucleotide internucleotide linkages with phosphorothioate, phosphorodithioate, and/or 5′-methylphosphonate linkages improves stability, excessive modifications can cause some toxicity or decreased activity. Therefore, when designing nucleic acid molecules, the amount of these internucleotide linkages should be minimized. The reduction in the concentration of these linkages should lower toxicity, resulting in increased efficacy and higher specificity of these molecules.

[0245] Short interfering nucleic acid (siNA) molecules having chemical modifications that maintain or enhance activity are provided. Such a nucleic acid is also generally more resistant to nucleases than an unmodified nucleic acid. Accordingly, the in vitro and/or in vivo activity should not be significantly lowered. In cases in which modulation is the goal, therapeutic nucleic acid molecules delivered exogenously should optimally be stable within cells until translation of the target RNA has been modulated long enough to reduce the levels of the undesirable protein. This period of time varies between hours to days depending upon the disease state. Improvements in the chemical synthesis of RNA and DNA (Wincott et al., 1995, Nucleic Acids Res. 23, 2677; Caruthers et al., 1992, Methods in Enzymology 211, 3-19 (incorporated by reference herein)) have expanded the ability to modify nucleic acid molecules by introducing nucleotide modifications to enhance their nuclease stability, as described above.

[0246] In one embodiment, nucleic acid molecules of the invention include one or more (e.g., about 1, 2, 3, 4, 5, 6, 7, 8, 9, 10, or more) G-clamp nucleotides. A G-clamp nucleotide is a modified cytosine analog wherein the modifications confer the ability to hydrogen bond both Watson-Crick and Hoogsteen faces of a complementary guanine within a duplex, see for example Lin and Matteucci, 1998, J. Am. Chem. Soc., 120, 8531-8532. A single G-clamp analog substitution within an oligonucleotide can result in substantially enhanced helical thermal stability and mismatch discrimination when hybridized to complementary oligonucleotides. The inclusion of such nucleotides in nucleic acid molecules of the invention results in both enhanced affinity and specificity to nucleic acid targets, complementary sequences, or template strands. In another embodiment, nucleic acid molecules of the invention include one or more (e.g., about 1, 2, 3, 4, 5, 6, 7, 8, 9, 10, or more) LNA “locked nucleic acid” nucleotides such as a 2′, 4′-C methylene bicyclo nucleotide (see for example Wengel et al., International PCT Publication No. WO 00/66604 and WO 99/14226).

[0247] In another embodiment, the invention features conjugates and/or complexes of siNA molecules of the invention. Such conjugates and/or complexes can be used to facilitate delivery of siNA molecules into a biological system, such as a cell. The conjugates and complexes provided by the instant invention can impart therapeutic activity by transferring therapeutic compounds across cellular membranes, altering the pharmacokinetics, and/or modulating the localization of nucleic acid molecules of the invention. The present invention encompasses the design and synthesis of novel conjugates and complexes for the delivery of molecules, including, but not limited to, small molecules, lipids, cholosterol, phospholipids, nucleosides, nucleotides, nucleic acids, antibodies, toxins, negatively charged polymers and other polymers, for example, proteins, peptides, hormones, carbohydrates, polyethylene glycols, or polyamines, across cellular membranes. In general, the transporters described are designed to be used either individually or as part of a multi-component system, with or without degradable linkers. These compounds are expected to improve delivery and/or localization of nucleic acid molecules of the invention into a number of cell types originating from different tissues, in the presence or absence of serum (see Sullenger and Cech, U.S. Pat. No. 5,854,038). Conjugates of the molecules described herein can be attached to biologically active molecules via linkers that are biodegradable, such as biodegradable nucleic acid linker molecules.

[0248] The term “biodegradable linker” as used herein, refers to a nucleic acid or non-nucleic acid linker molecule that is designed as a biodegradable linker to connect one molecule to another molecule, for example, a biologically active molecule to a siNA molecule of the invention or the sense and antisense strands of a siNA molecule of the invention. The biodegradable linker is designed such that its stability can be modulated for a particular purpose, such as delivery to a particular tissue or cell type. The stability of a nucleic acid-based biodegradable linker molecule can be modulated by using various chemistries, for example combinations of ribonucleotides, deoxyribonucleotides, and chemically-modified nucleotides, such as 2′-O-methyl, 2′-fluoro, 2′-amino, 2′-O-amino, 2′-C-allyl, 2′-O-allyl, and other 2′-modified or base modified nucleotides. The biodegradable nucleic acid linker molecule can be a dimer, trimer, tetramer or longer nucleic acid molecule, for example, an oligonucleotide of about 2, 3, 4, 5, 6, 7, 8, 9, 10, 11, 12, 13, 14, 15, 16, 17, 18, 19, or 20 nucleotides in length, or can comprise a single nucleotide with a phosphorus-based linkage, for example, a phosphoramidate or phosphodiester linkage. The biodegradable nucleic acid linker molecule can also comprise nucleic acid backbone, nucleic acid sugar, or nucleic acid base modifications.

[0249] The term “biodegradable” as used herein, refers to degradation in a biological system, for example enzymatic degradation or chemical degradation.

[0250] The term “biologically active molecule” as used herein, refers to compounds or molecules that are capable of eliciting or modifying a biological response in a system. Non-limiting examples of biologically active siNA molecules either alone or in combination with other molecules contemplated by the instant invention include therapeutically active molecules such as antibodies, cholesterol, hormones, antivirals, peptides, proteins, chemotherapeutics, small molecules, vitamins, co-factors, nucleosides, nucleotides, oligonucleotides, enzymatic nucleic acids, antisense nucleic acids, triplex forming oligonucleotides, 2,5-A chimeras, siNA, dsRNA, allozymes, aptamers, decoys and analogs thereof. Biologically active molecules of the invention also include molecules capable of modulating the pharmacokinetics and/or pharmacodynamics of other biologically active molecules, for example, lipids and polymers such as polyamines, polyamides, polyethylene glycol and other polyethers.

[0251] The term “phospholipid” as used herein, refers to a hydrophobic molecule comprising at least one phosphorus group. For example, a phospholipid can comprise a phosphorus-containing group and saturated or unsaturated alkyl group, optionally substituted with OH, COOH, oxo, amine, or substituted or unsubstituted aryl groups.

[0252] Therapeutic nucleic acid molecules (e.g., siNA molecules) delivered exogenously optimally are stable within cells until reverse transcription of the RNA has been modulated long enough to reduce the levels of the RNA transcript. The nucleic acid molecules are resistant to nucleases in order to function as effective intracellular therapeutic agents. Improvements in the chemical synthesis of nucleic acid molecules described in the instant invention and in the art have expanded the ability to modify nucleic acid molecules by introducing nucleotide modifications to enhance their nuclease stability as described above.

[0253] In yet another embodiment, siNA molecules having chemical modifications that maintain or enhance enzymatic activity of proteins involved in RNAi are provided. Such nucleic acids are also generally more resistant to nucleases than unmodified nucleic acids. Thus, in vitro and/or in vivo the activity should not be significantly lowered.

[0254] Use of the nucleic acid-based molecules of the invention will lead to better treatment of the disease progression by affording the possibility of combination therapies (e.g., multiple siNA molecules targeted to different genes; nucleic acid molecules coupled with known small molecule modulators; or intermittent treatment with combinations of molecules, including different motifs and/or other chemical or biological molecules). The treatment of subjects with siNA molecules can also include combinations of different types of nucleic acid molecules, such as enzymatic nucleic acid molecules (ribozymes), allozymes, antisense, 2,5-A oligoadenylate, decoys, and aptamers.

[0255] In another aspect a siNA molecule of the invention comprises one or more 5′ and/or a 3′-cap structure, for example on only the sense siNA strand, the antisense siNA strand, or both siNA strands.

[0256] By “cap structure” is meant chemical modifications, which have been incorporated at either terminus of the oligonucleotide (see, for example, Adamic et al., U.S. Pat. No. 5,998,203, incorporated by reference herein). These terminal modifications protect the nucleic acid molecule from exonuclease degradation, and can help in delivery and/or localization within a cell. The cap can be present at the 5′-terminus (5′-cap) or at the 3′ -terminal (3′-cap) or can be present on both termini. Non-limiting examples of the 5′-cap include, but are not limited to, glyceryl, inverted deoxy abasic residue (moiety); 4′,5′-methylene nucleotide; 1 -(beta-D-erythrofuranosyl) nucleotide, 4′-thio nucleotide; carbocyclic nucleotide; 1,5-anhydrohexitol nucleotide; L-nucleotides; alpha-nucleotides; modified base nucleotide; phosphorodithioate linkage; threo-pentofuranosyl nucleotide; acyclic 3′,4′-seco nucleotide; acyclic 3,4-dihydroxybutyl nucleotide; acyclic 3,5-dihydroxypentyl nucleotide, 3′-3′-inverted nucleotide moiety; 3′-3′-inverted abasic moiety; 3′-2′-inverted nucleotide moiety; 3′-2′-inverted abasic moiety; 1,4-butanediol phosphate; 3′ -phosphoramidate; hexylphosphate; aminohexyl phosphate; 3′-phosphate; 3′-phosphorothioate; phosphorodithioate; or bridging or non-bridging methylphosphonate moiety.

[0257] Non-limiting examples of the 3′-cap include, but are not limited to, glyceryl, inverted deoxy abasic residue (moiety), 4′, 5′-methylene nucleotide; 1-(beta-D-erythrofuranosyl) nucleotide; 4′-thio nucleotide, carbocyclic nucleotide; 5′-amino-alkyl phosphate; 1,3-diamino-2-propyl phosphate; 3-aminopropyl phosphate; 6-aminohexyl phosphate; 1,2-aminododecyl phosphate; hydroxypropyl phosphate; 1,5-anhydrohexitol nucleotide; L-nucleotide; alpha-nucleotide; modified base nucleotide; phosphorodithioate; threo-pentofuranosyl nucleotide; acyclic 3′,4′-seco nucleotide; 3,4-dihydroxybutyl nucleotide; 3,5-dihydroxypentyl nucleotide, 5′-5′-inverted nucleotide moiety; 5′-5′-inverted abasic moiety; 5′-phosphoramidate; 5′-phosphorothioate; 1,4-butanediol phosphate; 5′-amino; bridging and/or non-bridging 5′-phosphoramidate, phosphorothioate and/or phosphorodithioate, bridging or non bridging methylphosphonate and 5′-mercapto moieties (for more details see Beaucage and Iyer, 1993, Tetrahedron 49, 1925; incorporated by reference herein).

[0258] By the term “non-nucleotide” is meant any group or compound which can be incorporated into a nucleic acid chain in the place of one or more nucleotide units, including either sugar and/or phosphate substitutions, and allows the remaining bases to exhibit their enzymatic activity. The group or compound is abasic in that it does not contain a commonly recognized nucleotide base, such as adenosine, guanine, cytosine, uracil or thymine and therefore lacks a base at the 1′-position.

[0259] An “alkyl” group refers to a saturated aliphatic hydrocarbon, including straight-chain, branched-chain, and cyclic alkyl groups. Preferably, the alkyl group has 1 to 12 carbons. More preferably, it is a lower alkyl of from 1 to 7 carbons, more preferably 1 to 4 carbons. The alkyl group can be substituted or unsubstituted. When substituted the substituted group(s) is preferably, hydroxyl, cyano, alkoxy, ═O, ═S, NO₂ or N(CH₃)₂, amino, or SH. The term also includes alkenyl groups that are unsaturated hydrocarbon groups containing at least one carbon-carbon double bond, including straight-chain, branched-chain, and cyclic groups. Preferably, the alkenyl group has 1 to 12 carbons. More preferably, it is a lower alkenyl of from 1 to 7 carbons, more preferably 1 to 4 carbons. The alkenyl group may be substituted or unsubstituted. When substituted the substituted group(s) is preferably, hydroxyl, cyano, alkoxy, ═O, ═S, NO₂, halogen, N(CH₃)₂, amino, or SH. The term “alkyl” also includes alkynyl groups that have an unsaturated hydrocarbon group containing at least one carbon-carbon triple bond, including straight-chain, branched-chain, and cyclic groups. Preferably, the alkynyl group has 1 to 12 carbons. More preferably, it is a lower alkynyl of from 1 to 7 carbons, more preferably 1 to 4 carbons. The alkynyl group may be substituted or unsubstituted. When substituted the substituted group(s) is preferably, hydroxyl, cyano, alkoxy, ═O, ═S, NO₂ or N(CH₃)₂, amino or SH.

[0260] Such alkyl groups can also include aryl, alkylaryl, carbocyclic aryl, heterocyclic aryl, amide and ester groups. An “aryl” group refers to an aromatic group that has at least one ring having a conjugated pi electron system and includes carbocyclic aryl, heterocyclic aryl and biaryl groups, all of which may be optionally substituted. The preferred substituent(s) of aryl groups are halogen, trihalomethyl, hydroxyl, SH, OH, cyano, alkoxy, alkyl, alkenyl, alkynyl, and amino groups. An “alkylaryl” group refers to an alkyl group (as described above) covalently joined to an aryl group (as described above). Carbocyclic aryl groups are groups wherein the ring atoms on the aromatic ring are all carbon atoms. The carbon atoms are optionally substituted. Heterocyclic aryl groups are groups having from 1 to 3 heteroatoms as ring atoms in the aromatic ring and the remainder of the ring atoms are carbon atoms. Suitable heteroatoms include oxygen, sulfur, and nitrogen, and include furanyl, thienyl, pyridyl, pyrrolyl, N-lower alkyl pyrrolo, pyrimidyl, pyrazinyl, imidazolyl and the like, all optionally substituted. An “amide” refers to an —C(O)—NH—R, where R is either alkyl, aryl, alkylaryl or hydrogen. An “ester” refers to an —C(O)—OR′, where R is either alkyl, aryl, alkylaryl or hydrogen.

[0261] By “nucleotide” as used herein is as recognized in the art to include natural bases (standard), and modified bases well known in the art. Such bases are generally located at the 1′ position of a nucleotide sugar moiety. Nucleotides generally comprise a base, sugar and a phosphate group. The nucleotides can be unmodified or modified at the sugar, phosphate and/or base moiety, (also referred to interchangeably as nucleotide analogs, modified nucleotides, non-natural nucleotides, non-standard nucleotides and other; see, for example, Usman and McSwiggen, supra; Eckstein et al., International PCT Publication No. WO 92/07065; Usman et al., International PCT Publication No. WO 93/15187; Uhlman & Peyman, supra, all are hereby incorporated by reference herein). There are several examples of modified nucleic acid bases known in the art as summarized by Limbach et al., 1994, Nucleic Acids Res. 22, 2183. Some of the non-limiting examples of base modifications that can be introduced into nucleic acid molecules include, inosine, purine, pyridin-4-one, pyridin-2-one, phenyl, pseudouracil, 2, 4, 6-trimethoxy benzene, 3-methyl uracil, dihydrouridine, naphthyl, aminophenyl, 5-alkylcytidines (e.g., 5-methylcytidine), 5-alkyluridines (e.g., ribothymidine), 5-halouridine (e.g., 5-bromouridine) or 6-azapyrimidines or 6-alkylpyrimidines (e.g. 6-methyluridine), propyne, and others (Burgin et al., 1996, Biochemistry, 35, 14090; Uhlman & Peyman, supra). By “modified bases” in this aspect is meant nucleotide bases other than adenine, guanine, cytosine and uracil at 1′ position or their equivalents.

[0262] In one embodiment, the invention features modified siNA molecules, with phosphate backbone modifications comprising one or more phosphorothioate, phosphorodithioate, methylphosphonate, phosphotriester, morpholino, amidate carbamate, carboxymethyl, acetamidate, polyamide, sulfonate, sulfonamide, sulfamate, fonnacetal, thioformacetal, and/or alkylsilyl, substitutions. For a review of oligonucleotide backbone modifications, see Hunziker and Leumann, 1995, Nucleic Acid Analogues: Synthesis and Properties, in Modern Synthetic Methods, VCH, 331-417, and Mesmaeker et al., 1994, Novel Backbone Replacements for Oligonucleotides, in Carbohydrate Modifications in Antisense Research, ACS, 24-39.

[0263] By “abasic” is meant sugar moieties lacking a base or having other chemical groups in place of a base at the 1′ position, see for example Adamic et al., U.S. Pat. No. 5,998,203.

[0264] By “unmodified nucleoside” is meant one of the bases adenine, cytosine, guanine, thymine, or uracil joined to the 1′ carbon of β-D-ribo-furanose.

[0265] By “modified nucleoside” is meant any nucleotide base which contains a modification in the chemical structure of an unmodified nucleotide base, sugar and/or phosphate. Non-limiting examples of modified nucleotides are shown by Formulae I-VII and/or other modifications described herein.

[0266] In connection with 2′-modified nucleotides as described for the present invention, by “amino” is meant 2′—NH2 or 2′—O—NH₂, which can be modified or unmodified. Such modified groups are described, for example, in Eckstein et al., U.S. Pat. No. 5,672,695 and Matulic-Adamic et al., U.S. Pat. No. 6,248,878, which are both incorporated by reference in their entireties.

[0267] Various modifications to nucleic acid siNA structure can be made to enhance the utility of these molecules. Such modifications will enhance shelf-life, half-life in vitro, stability, and ease of introduction of such oligonucleotides to the target site, e.g., to enhance penetration of cellular membranes, and confer the ability to recognize and bind to targeted cells.

Administration of Nucleic Acid Molecules

[0268] A siNA molecule of the invention can be adapted for use to treat, for example, oncology and proliferation related indications and conditions such as multidrug resistant cancers, breast cancer, cancers of the head and neck including various lymphomas such as mantle cell lymphoma, non-Hodgkins lymphoma, adenoma, squamous cell carcinoma, laryngeal carcinoma, cancers of the retina, cancers of the esophagus, multiple myeloma, ovarian cancer, melanoma, colorectal cancer, hepatocellular carcinoma, lung cancer, bladder cancer, pancreatic cancer, prostate cancer, glioblastoma; obesity and insulin resistance (e.g. type I and II diabetes); inflammatory disorders such as asthma, septic shock, rheumatoid arthritis, psoriasis, inflammatory bowl syndrome and any other diseases or conditions that are related to or will respond to the levels of MAP kinase in a cell or tissue, alone or in combination with other therapies. For example, a siNA molecule can comprise a delivery vehicle, including liposomes, for administration to a subject, carriers and diluents and their salts, and/or can be present in pharmaceutically acceptable formulations. Methods for the delivery of nucleic acid molecules are described in Akhtar et al., 1992, Trends Cell Bio., 2, 139; Delivery Strategies for Antisense Oligonucleotide Therapeutics, ed. Akhtar, 1995, Maurer et al., 1999, Mol. Membr. Biol., 16, 129-140; Hofland and Huang, 1999, Handb. Exp. Pharmacol., 137, 165-192; and Lee et al., 2000, ACS Symp. Ser., 752, 184-192, all of which are incorporated herein by reference. Beigelman et al, U.S. Pat. No. 6,395,713 and Sullivan et al., PCT WO 94/02595 further describe the general methods for delivery of nucleic acid molecules. These protocols can be utilized for the delivery of virtually any nucleic acid molecule. Nucleic acid molecules can be administered to cells by a variety of methods known to those of skill in the art, including, but not restricted to, encapsulation in liposomes, by iontophoresis, or by incorporation into other vehicles, such as biodegradable polymers, hydrogels, cyclodextrins (see for example Gonzalez et al., 1999, Bioconjugate Chem., 10, 1068-1074), poly(lactic-co-glycolic)acid (PLGA) and PLCA microspheres (see for example U.S. Pat. No. 6,447,796 and US Patent Application Publication No. US 2002130430), biodegradable nanocapsules, and bioadhesive microspheres, or by proteinaceous vectors (O'Hare and Normand, International PCT Publication No. WO 00/53722). Alternatively, the nucleic acid/vehicle combination is locally delivered by direct injection or by use of an infusion pump. Direct injection of the nucleic acid molecules of the invention, whether subcutaneous, intramuscular, or intradermal, can take place using standard needle and syringe methodologies, or by needle-free technologies such as those described in Conry et al., 1999, Clin. Cancer Res., 5, 2330-2337 and Barry et al., International PCT Publication No. WO 99/31262. The molecules of the instant invention can be used as pharmaceutical agents. Pharmaceutical agents prevent, modulate the occurrence, or treat (alleviate a symptom to some extent, preferably all of the symptoms) of a disease state in a subject.

[0269] Thus, the invention features a pharmaceutical composition comprising one or more nucleic acid(s) of the invention in an acceptable carrier, such as a stabilizer, buffer, and the like. The polynucleotides of the invention can be administered (e.g., RNA, DNA or protein) and introduced into a subject by any standard means, with or without stabilizers, buffers, and the like, to form a pharmaceutical composition. When it is desired to use a liposome delivery mechanism, standard protocols for formation of liposomes can be followed. The compositions of the present invention can also be formulated and used as tablets, capsules or elixirs for oral administration, suppositories for rectal administration, sterile solutions, suspensions for injectable administration, and the other compositions known in the art.

[0270] The present invention also includes pharmaceutically acceptable formulations of the compounds described. These formulations include salts of the above compounds, e.g., acid addition salts, for example, salts of hydrochloric, hydrobromic, acetic acid, and benzene sulfonic acid.

[0271] A pharmacological composition or formulation refers to a composition or formulation in a form suitable for administration, e.g., systemic administration, into a cell or subject, including for example a human. Suitable forms, in part, depend upon the use or the route of entry, for example oral, transdermal, or by injection. Such forms should not prevent the composition or formulation from reaching a target cell (i.e., a cell to which the negatively charged nucleic acid is desirable for delivery). For example, pharmacological compositions injected into the blood stream should be soluble. Other factors are known in the art, and include considerations such as toxicity and forms that prevent the composition or formulation from exerting its effect.

[0272] By “systemic administration” is meant in vivo systemic absorption or accumulation of drugs in the blood stream followed by distribution throughout the entire body. Administration routes that lead to systemic absorption include, without limitation: intravenous, subcutaneous, intraperitoneal, inhalation, oral, intrapulmonary and intramuscular. Each of these administration routes exposes the siNA molecules of the invention to an accessible diseased tissue. The rate of entry of a drug into the circulation has been shown to be a function of molecular weight or size. The use of a liposome or other drug carrier comprising the compounds of the instant invention can potentially localize the drug, for example, in certain tissue types, such as the tissues of the reticular endothelial system (RES). A liposome formulation that can facilitate the association of drug with the surface of cells, such as, lymphocytes and macrophages is also useful. This approach can provide enhanced delivery of the drug to target cells by taking advantage of the specificity of macrophage and lymphocyte immune recognition of abnormal cells, such as cells producing excess MAP kinase.

[0273] By “pharmaceutically acceptable formulation” is meant a composition or formulation that allows for the effective distribution of the nucleic acid molecules of the instant invention in the physical location most suitable for their desired activity. Non-limiting examples of agents suitable for formulation with the nucleic acid molecules of the instant invention include: P-glycoprotein inhibitors (such as Pluronic P85), which can enhance entry of drugs into the CNS (Jolliet-Riant and Tillement, 1999, Fundam. Clin. Pharmacol., 13, 16-26); biodegradable polymers, such as poly (DL-lactide-coglycolide) microspheres for sustained release delivery after intracerebral implantation (Emerich, DF et al, 1999, Cell Transplant, 8, 47-58) (Alkermes, Inc. Cambridge, Mass.); and loaded nanoparticles, such as those made of polybutylcyanoacrylate, which can deliver drugs across the blood brain barrier and can alter neuronal uptake mechanisms (Prog Neuropsychopharmacol Biol Psychiatry, 23, 941-949, 1999). Other non-limiting examples of delivery strategies for the nucleic acid molecules of the instant invention include material described in Boado et al, 1998, J. Pharm. Sci., 87, 1308-1315; Tyler et al., 1999, FEBS Lett., 421, 280-284; Pardridge et al., 1995, PNAS USA., 92, 5592-5596; Boado, 1995, Adv. Drug Delivery Rev., 15, 73-107; Aldrian-Herrada et al., 1998, Nucleic Acids Res., 26, 4910-4916; and Tyler et al., 1999, PNAS USA., 96, 7053-7058.

[0274] The invention also features the use of the composition comprising surface-modified liposomes containing poly (ethylene glycol) lipids (PEG-modified, or long-circulating liposomes or stealth liposomes). These formulations offer a method for increasing the accumulation of drugs in target tissues. This class of drug carriers resists opsonization and elimination by the mononuclear phagocytic system (MPS or RES), thereby enabling longer blood circulation times and enhanced tissue exposure for the encapsulated drug (Lasic et al. Chem. Rev. 1995, 95, 2601-2627; Ishiwata et al., Chem. Pharm. Bull. 1995, 43, 1005-1011). Such liposomes have been shown to accumulate selectively in tumors, presumably by extravasation and capture in the neovascularized target tissues (Lasic et al., Science 1995, 267, 1275-1276; Oku et al., 1995, Biochim. Biophys. Acta, 1238, 86-90). The long-circulating liposomes enhance the pharmacokinetics and pharmacodynamics of DNA and RNA, particularly compared to conventional cationic liposomes which are known to accumulate in tissues of the MPS (Liu et al., J. Biol. Chem. 1995, 42, 24864-24870; Choi et. al., International PCT Publication No. WO 96/10391; Ansell et al., International PCT Publication No. WO 96/10390; Holland et al., International PCT Publication No. WO 96/10392). Long-circulating liposomes are also likely to protect drugs from nuclease degradation to a greater extent compared to cationic liposomes, based on their ability to avoid accumulation in metabolically aggressive MPS tissues such as the liver and spleen.

[0275] The present invention also includes compositions prepared for storage or administration that include a pharmaceutically effective amount of the desired compounds in a pharmaceutically acceptable carrier or diluent. Acceptable carriers or diluents for therapeutic use are well known in the pharmaceutical art, and are described, for example, in Remington's Pharmaceutical Sciences, Mack Publishing Co. (A. R. Gennaro edit. 1985), hereby incorporated by reference herein. For example, preservatives, stabilizers, dyes and flavoring agents can be provided. These include sodium benzoate, sorbic acid and esters of p-hydroxybenzoic acid. In addition, antioxidants and suspending agents can be used.

[0276] A pharmaceutically effective dose is that dose required to prevent, inhibit the occurrence, or treat (alleviate a symptom to some extent, preferably all of the symptoms) of a disease state. The pharmaceutically effective dose depends on the type of disease, the composition used, the route of administration, the type of mammal being treated, the physical characteristics of the specific mammal under consideration, concurrent medication, and other factors that those skilled in the medical arts will recognize. Generally, an amount between 0.1 mg/kg and 100 mg/kg body weight/day of active ingredients is administered dependent upon potency of the negatively charged polymer.

[0277] The nucleic acid molecules of the invention and formulations thereof can be administered orally, topically, parenterally, by inhalation or spray, or rectally in dosage unit formulations containing conventional non-toxic pharmaceutically acceptable carriers, adjuvants and/or vehicles. The term parenteral as used herein includes percutaneous, subcutaneous, intravascular (e.g., intravenous), intramuscular, or intrathecal injection or infusion techniques and the like. In addition, there is provided a pharmaceutical formulation comprising a nucleic acid molecule of the invention and a pharmaceutically acceptable carrier. One or more nucleic acid molecules of the invention can be present in association with one or more non-toxic pharmaceutically acceptable carriers and/or diluents and/or adjuvants, and if desired other active ingredients. The pharmaceutical compositions containing nucleic acid molecules of the invention can be in a form suitable for oral use, for example, as tablets, troches, lozenges, aqueous or oily suspensions, dispersible powders or granules, emulsion, hard or soft capsules, or syrups or elixirs.

[0278] Compositions intended for oral use can be prepared according to any method known to the art for the manufacture of pharmaceutical compositions and such compositions can contain one or more such sweetening agents, flavoring agents, coloring agents or preservative agents in order to provide pharmaceutically elegant and palatable preparations. Tablets contain the active ingredient in admixture with non-toxic pharmaceutically acceptable excipients that are suitable for the manufacture of tablets. These excipients can be, for example, inert diluents; such as calcium carbonate, sodium carbonate, lactose, calcium phosphate or sodium phosphate; granulating and disintegrating agents, for example, corn starch, or alginic acid; binding agents, for example starch, gelatin or acacia; and lubricating agents, for example magnesium stearate, stearic acid or talc. The tablets can be uncoated or they can be coated by known techniques. In some cases such coatings can be prepared by known techniques to delay disintegration and absorption in the gastrointestinal tract and thereby provide a sustained action over a longer period. For example, a time delay material such as glyceryl monosterate or glyceryl distearate can be employed.

[0279] Formulations for oral use can also be presented as hard gelatin capsules wherein the active ingredient is mixed with an inert solid diluent, for example, calcium carbonate, calcium phosphate or kaolin, or as soft gelatin capsules wherein the active ingredient is mixed with water or an oil medium, for example peanut oil, liquid paraffin or olive oil.

[0280] Aqueous suspensions contain the active materials in a mixture with excipients suitable for the manufacture of aqueous suspensions. Such excipients are suspending agents, for example sodium carboxymethylcellulose, methylcellulose, hydropropyl-methylcellulose, sodium alginate, polyvinylpyrrolidone, gum tragacanth and gum acacia; dispersing or wetting agents can be a naturally-occurring phosphatide, for example, lecithin, or condensation products of an alkylene oxide with fatty acids, for example polyoxyethylene stearate, or condensation products of ethylene oxide with long chain aliphatic alcohols, for example heptadecaethyleneoxycetanol, or condensation products of ethylene oxide with partial esters derived from fatty acids and a hexitol such as polyoxyethylene sorbitol monooleate, or condensation products of ethylene oxide with partial esters derived from fatty acids and hexitol anhydrides, for example polyethylene sorbitan monooleate. The aqueous suspensions can also contain one or more preservatives, for example ethyl, or n-propyl p-hydroxybenzoate, one or more coloring agents, one or more flavoring agents, and one or more sweetening agents, such as sucrose or saccharin.

[0281] Oily suspensions can be formulated by suspending the active ingredients in a vegetable oil, for example arachis oil, olive oil, sesame oil or coconut oil, or in a mineral oil such as liquid paraffin. The oily suspensions can contain a thickening agent, for example beeswax, hard paraffin or cetyl alcohol. Sweetening agents and flavoring agents can be added to provide palatable oral preparations. These compositions can be preserved by the addition of an anti-oxidant such as ascorbic acid

[0282] Dispersible powders and granules suitable for preparation of an aqueous suspension by the addition of water provide the active ingredient in admixture with a dispersing or wetting agent, suspending agent and one or more preservatives. Suitable dispersing or wetting agents or suspending agents are exemplified by those already mentioned above. Additional excipients, for example sweetening, flavoring and coloring agents, can also be present.

[0283] Pharmaceutical compositions of the invention can also be in the form of oil-in-water emulsions. The oily phase can be a vegetable oil or a mineral oil or mixtures of these. Suitable emulsifying agents can be naturally-occurring gums, for example gum acacia or gum tragacanth, naturally-occurring phosphatides, for example soy bean, lecithin, and esters or partial esters derived from fatty acids and hexitol, anhydrides, for example sorbitan monooleate, and condensation products of the said partial esters with ethylene oxide, for example polyoxyethylene sorbitan monooleate. The emulsions can also contain sweetening and flavoring agents.

[0284] Syrups and elixirs can be formulated with sweetening agents, for example glycerol, propylene glycol, sorbitol, glucose or sucrose. Such formulations can also contain a demulcent, a preservative and flavoring and coloring agents. The pharmaceutical compositions can be in the form of a sterile injectable aqueous or oleaginous suspension. This suspension can be formulated according to the known art using those suitable dispersing or wetting agents and suspending agents that have been mentioned above. The sterile injectable preparation can also be a sterile injectable solution or suspension in a non-toxic parentally acceptable diluent or solvent, for example as a solution in 1,3-butanediol. Among the acceptable vehicles and solvents that can be employed are water, Ringer's solution and isotonic sodium chloride solution. In addition, sterile, fixed oils are conventionally employed as a solvent or suspending medium. For this purpose, any bland fixed oil can be employed including synthetic mono-or diglycerides. In addition, fatty acids such as oleic acid find use in the preparation of injectables.

[0285] The nucleic acid molecules of the invention can also be administered in the form of suppositories, e.g., for rectal administration of the drug. These compositions can be prepared by mixing the drug with a suitable non-irritating excipient that is solid at ordinary temperatures but liquid at the rectal temperature and will therefore melt in the rectum to release the drug. Such materials include cocoa butter and polyethylene glycols.

[0286] Nucleic acid molecules of the invention can be administered parenterally in a sterile medium. The drug, depending on the vehicle and concentration used, can either be suspended or dissolved in the vehicle. Advantageously, adjuvants such as local anesthetics, preservatives and buffering agents can be dissolved in the vehicle.

[0287] Dosage levels of the order of from about 0.1 mg to about 140 mg per kilogram of body weight per day are useful in the treatment of the above-indicated conditions (about 0.5 mg to about 7 g per subject per day). The amount of active ingredient that can be combined with the carrier materials to produce a single dosage form varies depending upon the host treated and the particular mode of administration. Dosage unit forms generally contain between from about 1 mg to about 500 mg of an active ingredient.

[0288] It is understood that the specific dose level for any particular subject depends upon a variety of factors including the activity of the specific compound employed, the age, body weight, general health, sex, diet, time of administration, route of administration, and rate of excretion, drug combination and the severity of the particular disease undergoing therapy.

[0289] For administration to non-human animals, the composition can also be added to the animal feed or drinking water. It can be convenient to formulate the animal feed and drinking water compositions so that the animal takes in a therapeutically appropriate quantity of the composition along with its diet. It can also be convenient to present the composition as a premix for addition to the feed or drinking water.

[0290] The nucleic acid molecules of the present invention can also be administered to a subject in combination with other therapeutic compounds to increase the overall therapeutic effect. The use of multiple compounds to treat an indication can increase the beneficial effects while reducing the presence of side effects.

[0291] In one embodiment, the invention comprises compositions suitable for administering nucleic acid molecules of the invention to specific cell types. For example, the asialoglycoprotein receptor (ASGPr) (Wu and Wu, 1987, J. Biol. Chem. 262, 4429-4432) is unique to hepatocytes and binds branched galactose-terminal glycoproteins, such as asialoorosomucoid (ASOR). In another example, the folate receptor is overexpressed in many cancer cells. Binding of such glycoproteins, synthetic glycoconjugates, or folates to the receptor takes place with an affinity that strongly depends on the degree of branching of the oligosaccharide chain, for example, triatennary structures are bound with greater affinity than biatenarry or monoatennary chains (Baenziger and Fiete, 1980, Cell, 22, 611-620; Connolly et al., 1982, J. Biol. Chem., 257, 939-945). Lee and Lee, 1987, Glycoconjugate J., 4, 317-328, obtained this high specificity through the use of N-acetyl-D-galactosamine as the carbohydrate moiety, which has higher affinity for the receptor, compared to galactose. This “clustering effect” has also been described for the binding and uptake of mannosyl-terminating glycoproteins or glycoconjugates (Ponpipom et al., 1981, J. Med. Chem., 24, 1388-1395). The use of galactose, galactosamine, or folate based conjugates to transport exogenous compounds across cell membranes can provide a targeted delivery approach to, for example, the treatment of liver disease, cancers of the liver, or other cancers. The use of bioconjugates can also provide a reduction in the required dose of therapeutic compounds required for treatment. Furthermore, therapeutic bioavialability, pharmacodynamics, and pharmacokinetic parameters can be modulated through the use of nucleic acid bioconjugates of the invention. Non-limiting examples of such bioconjugates are described in Vargeese et al., U.S. Ser. No. 10/201,394, filed Aug. 13, 2001; and Matulic-Adamic et al., U.S. Ser. No. 60/362,016, filed Mar. 6, 2002.

[0292] Alternatively, certain siNA molecules of the instant invention can be expressed within cells from eukaryotic promoters (e.g., Izant and Weintraub, 1985, Science, 229, 345; McGarry and Lindquist, 1986, Proc. Natl. Acad. Sci., USA 83, 399; Scanlon et al., 1991, Proc. Natl. Acad. Sci. USA, 88, 10591-5; Kashani-Sabet et al., 1992, Antisense Res. Dev., 2, 3-15; Dropulic et al., 1992, J. Virol., 66, 1432-41; Weerasinghe et al., 1991, J. Virol., 65, 5531-4; Ojwang et al., 1992, Proc. Natl. Acad. Sci. USA, 89, 10802-6; Chen et al., 1992, Nucleic Acids Res., 20, 4581-9; Sarver et al., 1990 Science, 247, 1222-1225; Thompson et al., 1995, Nucleic Acids Res., 23, 2259; Good et al., 1997, Gene Therapy, 4, 45. Those skilled in the art realize that any nucleic acid can be expressed in eukaryotic cells from the appropriate DNA/RNA vector. The activity of such nucleic acids can be augmented by their release from the primary transcript by an enzymatic nucleic acid (Draper et al., PCT WO 93/23569, and Sullivan et al., PCT WO 94/02595; Ohkawa et al., 1992, Nucleic Acids Symp. Ser., 27, 15-6; Taira et al., 1991, Nucleic Acids Res., 19, 5125-30; Ventura et al., 1993, Nucleic Acids Res., 21, 3249-55; Chowrira et al., 1994, J. Biol. Chem., 269, 25856.

[0293] In another aspect of the invention, RNA molecules of the present invention can be expressed from transcription units (see for example Couture et al., 1996, TIG., 12, 510) inserted into DNA or RNA vectors. The recombinant vectors can be DNA plasmids or viral vectors. siNA expressing viral vectors can be constructed based on, but not limited to, adeno-associated virus, retrovirus, adenovirus, or alphavirus. In another embodiment, pol III based constructs are used to express nucleic acid molecules of the invention (see for example Thompson, U.S. Pat. Nos. 5,902,880 and 6,146,886). The recombinant vectors capable of expressing the siNA molecules can be delivered as described above, and persist in target cells. Alternatively, viral vectors can be used that provide for transient expression of nucleic acid molecules. Such vectors can be repeatedly administered as necessary. Once expressed, the siNA molecule interacts with the target mRNA and generates an RNAi response. Delivery of siNA molecule expressing vectors can be systemic, such as by intravenous or intramuscular administration, by administration to target cells ex-planted from a subject followed by reintroduction into the subject, or by any other means that would allow for introduction into the desired target cell (for a review see Couture et al., 1996, TIG., 12, 510).

[0294] In one aspect the invention features an expression vector comprising a nucleic acid sequence encoding at least one siNA molecule of the instant invention. The expression vector can encode one or both strands of a siNA duplex, or a single self-complementary strand that self hybridizes into a siNA duplex. The nucleic acid sequences encoding the siNA molecules of the instant invention can be operably linked in a manner that allows expression of the siNA molecule (see for example Paul et al., 2002, Nature Biotechnology, 19, 505; Miyagishi and Taira, 2002, Nature Biotechnology, 19, 497; Lee et al., 2002, Nature Biotechnology, 19, 500; and Novina et al., 2002, Nature Medicine, advance online publication doi: 10.1038/nm725).

[0295] In another aspect, the invention features an expression vector comprising: a) a transcription initiation region (e.g., eukaryotic pol I, II or III initiation region); b) a transcription termination region (e.g., eukaryotic pol I, II or III termination region); and c) a nucleic acid sequence encoding at least one of the siNA molecules of the instant invention, wherein said sequence is operably linked to said initiation region and said termination region in a manner that allows expression and/or delivery of the siNA molecule. The vector can optionally include an open reading frame (ORF) for a protein operably linked on the 5′ side or the 3′-side of the sequence encoding the siNA of the invention and/or an intron (intervening sequences).

[0296] Transcription of the siNA molecule sequences can be driven from a promoter for eukaryotic RNA polymerase I (pol I), RNA polymerase II (pol II), or RNA polymerase III (pol III). Transcripts from pol II or pol III promoters are expressed at high levels in all cells; the levels of a given pol II promoter in a given cell type depends on the nature of the gene regulatory sequences (enhancers, silencers, etc.) present nearby. Prokaryotic RNA polymerase promoters are also used, providing that the prokaryotic RNA polymerase enzyme is expressed in the appropriate cells (Elroy-Stein and Moss, 1990, Proc. Natl. Acad. Sci. USA, 87, 6743-7; Gao and Huang 1993, Nucleic Acids Res., 21, 2867-72; Lieber et al., 1993, Methods Enzymol., 217, 47-66; Zhou et al., 1990, Mol. Cell. Biol., 10, 4529-37). Several investigators have demonstrated that nucleic acid molecules expressed from such promoters can function in mammalian cells (e.g. Kashani-Sabet et al., 1992, Antisense Res. Dev., 2, 3-15; Ojwang et al., 1992, Proc. Natl. Acad. Sci. USA, 89, 10802-6; Chen et al., 1992, Nucleic Acids Res., 20, 4581-9; Yu et al., 1993, Proc. Natl. Acad. Sci. USA, 90, 6340-4; L'Huillier et al., 1992, EMBO J., 11, 4411-8; Lisziewicz et al., 1993, Proc. Natl. Acad. Sci. U.S.A, 90, 8000-4; Thompson et al., 1995, Nucleic Acids Res., 23, 2259; Sullenger & Cech, 1993, Science, 262, 1566). More specifically, transcription units such as the ones derived from genes encoding U6 small nuclear (snRNA), transfer RNA (tRNA) and adenovirus VA RNA are useful in generating high concentrations of desired RNA molecules such as siNA in cells (Thompson et al., supra; Couture and Stinchcomb, 1996, supra; Noonberg et al., 1994, Nucleic Acid Res., 22, 2830; Noonberg et al., U.S. Pat. No. 5,624,803; Good et al., 1997, Gene Ther., 4, 45; Beigelman et al., International PCT Publication No. WO 96/18736. The above siNA transcription units can be incorporated into a variety of vectors for introduction into mammalian cells, including but not restricted to, plasmid DNA vectors, viral DNA vectors (such as adenovirus or adeno-associated virus vectors), or viral RNA vectors (such as retroviral or alphavirus vectors) (for a review see Couture and Stinchcomb, 1996, supra).

[0297] In another aspect the invention features an expression vector comprising a nucleic acid sequence encoding at least one of the siNA molecules of the invention in a manner that allows expression of that siNA molecule. The expression vector comprises in one embodiment; a) a transcription initiation region; b) a transcription termination region; and c) a nucleic acid sequence encoding at least one strand of the siNA molecule, wherein the sequence is operably linked to the initiation region and the termination region in a manner that allows expression and/or delivery of the siNA molecule.

[0298] In another embodiment the expression vector comprises: a) a transcription initiation region; b) a transcription termination region; c) an open reading frame; and d) a nucleic acid sequence encoding at least one strand of a siNA molecule, wherein the sequence is operably linked to the 3′-end of the open reading frame and wherein the sequence is operably linked to the initiation region, the open reading frame and the termination region in a manner that allows expression and/or delivery of the siNA molecule. In yet another embodiment, the expression vector comprises: a) a transcription initiation region; b) a transcription termination region; c) an intron; and d) a nucleic acid sequence encoding at least one siNA molecule, wherein the sequence is operably linked to the initiation region, the intron and the termination region in a manner which allows expression and/or delivery of the nucleic acid molecule.

[0299] In another embodiment, the expression vector comprises: a) a transcription initiation region; b) a transcription termination region; c) an intron; d) an open reading frame; and e) a nucleic acid sequence encoding at least one strand of a siNA molecule, wherein the sequence is operably linked to the 3′-end of the open reading frame and wherein the sequence is operably linked to the initiation region, the intron, the open reading frame and the termination region in a manner which allows expression and/or delivery of the siNA molecule.

MAP Kinase Biology and Biochemistry

[0300] The mitogen-activated protein kinases (MAPKs) have been at the forefront of a rapid advance in the understanding of cellular events in growth factor and cytokine receptor signaling. The MAP kinases (also referred to as extracellular signal-regulated protein kinases, or ERKs) are the terminal enzymes in a three-kinase cascade. The reiteration of three-kinase cascades for related but distinct signaling pathways gave rise to the concept of a MAPK pathway as a modular, multifunctional signaling element that acts sequentially within one pathway, where each enzyme phosphorylates and thereby activates the next member in the sequence. A typical MAPK pathway thus consists of three protein kinases: a MAPK kinase kinase (or MEKK) that activates a MAPK kinase (or MEK) which, in turn, activates a MAPK/ERK enzyme. Each of the MAPK/ERK, JNK and p38 cascades consists of a three-enzyme module that includes MEKK, MEK and an ERK or MAPK superfamily member. A variety of extracellular signals triggers initial events upon association with their respective cell surface receptors and this signal is then transmitted to the interior of the cell where it activates the appropriate cascades (see for example FIG. 12).

[0301] The identification of distinct MAPK cascades that are conserved across all eukaryotes indicates that the MAPK module has been adapted for interpretation of a diverse array of extracellular signals. Although mitogen activation of the MAPK subfamily (e.g., ERK1 and ERK2) has dominated efforts to understand MAPK signaling, increasing appreciation of the role of the stress-activated kinases, JNK and p38, illustrates the diverse nature of the MAPK superfamily of enzymes. Although sequence similarities among components of the individual MAPK modules used for activation of ERK1/2, JNKs and p38 are considerable, the fidelity that is maintained in order to translate specific extracellular signals into discrete physiological responses illustrates the selective adaptation of each MAPK pathway. The MAPK superfamily of enzymes is a critical component cellular regulative processes that coordinates incoming signals generated by a variety of extracellular and intracellular mediators. Specific phosphorylation and activation of enzymes in the MAPK pathway transmits the signal down the cascade, resulting in phosphorylation of many proteins with substantial regulatory functions throughout the cell, including other protein kinases, transcription factors, cytoskeletal proteins and other enzymes. The diversity of signals that culminates in MAPK activation indicates that these enzymes are not dedicated to regulation of any single growth factor, hormone or cytokine system. Instead, MAPKs—like cAMP-dependent protein kinase (PKA) and Ca²⁺- and phospholipid-dependent protein kinases (PKC) serve many signaling purposes. Because activation of the MAPK pathways are triggered to varying extents by a large number of receptor systems, temporal and spatial differences are critical to determining ligand- and cell-type-specific functions.

[0302] Following activation of cells with an appropriate extracellular stimuli, the signal is transmitted to the canonical MAPK module comprising three protein kinases. The progression of events for each enzyme cascade is the same, although specific isoforms of each enzyme appear to confer the required specificity within each pathway. The first enzyme in the module is a MEKK enzyme, of which Raf and its isoforms are one example. The MEKK enzymes comprise Ser/Thr protein kinases that activate the MEK enzymes by phosphorylating two serine or threonine residues within a Ser-X-X-X-Ser/Thr motif. Once activated, the MEK enzymes, which are hybrid function Ser/Thr/Tyr protein kinases, phosphorylate the MAPK/ERK enzymes on Thr and Tyr residues within the Thr-X-Tyr (TXY) consensus sequence. A critical and common feature of the MAPK superfamily of enzymes is that they are activated upon dual phosphorylation within a TXY consensus sequence present in the activation loop of the catalytic domain. The central amino acid differs for each MAPK superfamily member, corresponding to Glu for ERK1/2, Gly for p38/HOG and Pro for JNK/SAPK, although MEK specificity is not limited to these particular residues. Phosphorylation at only one of the two positions does not appear to activate the enzyme, although it may prime the kinase domain for receipt of the second phosphorylation event.

[0303] ERK1 and ERK2 were the first members of the MAPK superfamily whose cDNAs were cloned and the signaling cascades that lead to their activation characterized. Potent activation of ERK1 and ERK2 can be initiated through activation of transmembrane receptors with intrinsic protein tyrosine kinase (PTK) activity. Binding of extracellular ligands to their respective cell surface receptors results in receptor autophosphorylation and enhanced PTK activity. The subsequent association of the Src homology 2 (SH2) domains of adaptor proteins such as Grb2 and She with the autophosphorylated receptors, or with additional docking proteins, provides the molecular interactions that bring the required signal transduction molecules into close proximity with each other. Receptors without intrinsic PTK activity but which comprise sites for tyrosine phosphorylation can also activate the cascade via association of their phosphotyrosine residues with adaptor molecules. For example, the SH3 domain of Grb2 binds a proline-rich region of the guanine nucleotide-exchange protein SOS which, in turn, increases the association of Ras with GTP. The GTP-bound form of Ras binds to Raf (a MAPK kinase) isoforms, including C-Raf-1, B-Raf and A-Raf. This action targets Raf to the membrane, where its protein kinase activity is increased by phosphorylation. MAPK kinases (MEK1 and MEK2), are phosphorylated and activated by Raf. MEK1 and MEK2 are dual-specificity protein kinases that dually phosphorylate the ERK enzymes (corresponding to Thr¹⁸³ and Tyr¹⁸⁵ of p42ERK2), thereby increasing their enzymatic activity by approximately 1,000-fold over the activity found with the basal or monophosphorylated forms. Phosphorylation of these residues causes closure of the kinase active site and induces conformational changes necessary for high activity.

[0304] MAPK mutants, lacking either a lysine required for catalytic activity or the prerequisite TXY phosphorylation sites, can inhibit signaling by the native enzymes in cells. In the case of ERK1 and ERK2, these mutants have been used with repeated success. For example, mutant ERK2 completely blocks proliferation in response to epidermal growth factor (EGF) and v-Raf, and partially blocks induction by serum or small t antigen. ERK1 antisense mRNA and an ERK1 phosphorylation site mutants interfere with thrombin-induced transcription as well as serum-dependent proliferation. These findings suggest an essential role in proliferation and transformation for the ERK/MAPK pathway.

[0305] The JNK/SAPK and p38/HOG pathways are activated by ultraviolet light, cytokines, osmotic shock, inhibitors of DNA, RNA, and protein synthesis, and to a lesser extent by certain growth factors. This spectrum of regulators suggests that the enzymes are transducers of a variety of cellular stress responses. In contrast to activation of ERK1 and ERK2, upstream signal transduction mechanisms for the JNK and p38 cascades are less well understood. When transfected into mammalian cells, a diverse group of protein kinases including the mixed lineage kinases (MLKs) and relatives of the yeast Ste2Op, such as the p21-activated kinases (PAKs) and germinal center kinase (GCK), cause activation of JNK/SAPK. Similarly, GTP-bound forms of the small GTP-binding proteins, Rae and Cdc42, activate the JNK/SAPK pathway and, to a lesser extent, the p38 pathway. Direct activation of both pathways by PAKs also has been demonstrated, suggesting that PAKs can be the relevant effectors for these small G proteins. The PAKs are homologs of the yeast kinases Ste2Op and Shk1, enzymes upstream of the MAPK modules in yeast pheromone response pathways. Both yeast and mammalian protein kinases contain a binding site for Rac/Cdc42 and share the property of being activated in vitro through association with these small G proteins when in their GTP-bound states. In yeast, Ste2Op is thought to phosphorylate and activate the MEKK isoform Stellp, suggesting that MEKKs may be PAK targets. This summary of MAP kinase pathways has been adapted from Cobb and Schaefer, 1996, Promega Notes Magazine Number 59, page 37.

[0306] The regulation of c-Jun transcriptional activity by Jun N-terminal kinase (JNK), ERK1, ERK2, and p38 kinases has become a paradigm for the understanding of how mitogen-activated protein (MAP) kinase signaling pathways elicit specific changes in gene transcription through selective phosphorylation of nuclear transcription factors. Selective phosphorylation of c-Jun by JNK is detected by a specific docking motif in c-Jun, the delta region, which enables JNK to physically interact with c-Jun. Analogous MAP kinase docking motifs have subsequently been found in several other transcription factors, indicating that this is a general mechanism for ensuring the specificity of signal transduction. Furthermore, genetic and biochemical studies in mice, flies and cultured cells have provided evidence that signals relayed by JNK through c-Jun regulate a wide range of cellular processes including cell proliferation, tumorigenesis, apoptosis and embryonic development. Despite these advances, in most cases, the genes or programs of gene expression downstream of JNK and c-Jun, which control these processes, have yet to be defined. One important process that is associated with JNK gene expression is the development of insulin resistance in obese subjects.

[0307] Obesity is closely associated with insulin resistance and establishes the leading risk factor for type 2 diabetes mellitus in mammals. The c-Jun amino-terminal kinases (JNKs) can interfere with insulin activity in cultured cells and are activated by inflammatory cytokines and free fatty acids molecules that have been implicated in the development of type 2 diabetes. Hirosumi et al, 2002, Nature, 420, 333-336, demonstrate that JNK activity is abnormally elevated in obesity. Furthermore, Hirosumi et al, supra have shown that an absence of JNK1 results in decreased adiposity with significantly improved insulin sensitivity and enhanced insulin receptor capacity in two different models of mouse obesity. Thus, JNK is a crucial mediator of obesity and insulin resistance and as such, provides a potential target for nucleic acid based therapeutics that modulate JNK gene expression.

[0308] The transcription factor and oncogene, c-JUN, is implicated in several critical cell processes including cell proliferation, cell survival, and oncogenic transformation. Although it is broadly expressed in a wide variety of cell types, it plays an especially important role in hepatocytes. However, the precise role played by c-JUN in hepatocytes seems to depend on the differentiation state of this cell type. Adult differentiated hepatocytes depend on c-JUN for progression through the cell cycle. Deletion of c-JUN reduces the proliferation capacity of hepatocytes following partial hepatectomy. c-JUN is thought to be major component in the development of human hepatocellular carcinoma (HCC). HCC is the the most common form of primary liver cancer. Chronic HCV infection is a major risk factor for HCC.

[0309] The role of c-JUN in liver cancer has recently been investigated (Eferl et al., 2003, Cell, 112, 181). These investigators deleted c-JUN and then induced liver cancer by chemical carcinogenesis. They observed that deletion of c-JUN dramatically interfered with liver tumor formation. Animal survival was markedly worse in c-JUN wildtype animals relative to deletion mutants. In particular, the number of apoptotic cells increased about five fold in tumors in the c-JUN deletion strain relative to the wildtype animals. Importantly, levels of the pro-apoptotic gene products such as p53 and noxa were elevated in the c-JUN deletion strain. c-JUN is likely to antagonize other pro-apoptotic genes such as TNF-a. Thus, by blocking p53 and its large family of dependent genes, c-JUN seems to promote tumor formation. Since a large fraction of chronically infected HCV patients develop hepatocellular carcinoma, c-JUN provides an attractive target for treating HCV infected patients to prevent or ameliorate hepatocellular carcinoma.

[0310] Based upon the current understanding of MAP kinase pathways, the modulation of MAP kinase pathways is instrumental in the development of new therapeutics in, for example, the fields of inflammation, oncology, and metabolism. As such, modulation of a specific MAP kinase pathway using small interfering nucleic acid (siNA) mediated RNAi represents a novel approach to the treatment and study of diseases and conditions related to a specific MAP kinase activity and/or gene expression.

### EXAMPLES

[0311] The following are non-limiting examples showing the selection, isolation, synthesis and activity of nucleic acids of the instant invention.

### Example 1

### Tandem Synthesis of siNA Constructs

[0312] Exemplary siNA molecules of the invention are synthesized in tandem using a cleavable linker, for example, a succinyl-based linker. Tandem synthesis as described herein is followed by a one-step purification process that provides RNAi molecules in high yield. This approach is highly amenable to siNA synthesis in support of high throughput RNAi screening, and can be readily adapted to multi-column or multi-well synthesis platforms.

[0313] After completing a tandem synthesis of a siNA oligo and its complement in which the 5′-terminal dimethoxytrityl (5′-O-DMT) group remains intact (trityl on synthesis), the oligonucleotides are deprotected as described above. Following deprotection, the siNA sequence strands are allowed to spontaneously hybridize. This hybridization yields a duplex in which one strand has retained the 5′-O-DMT group while the complementary strand comprises a terminal 5′-hydroxyl. The newly formed duplex behaves as a single molecule during routine solid-phase extraction purification (Trityl-On purification) even though only one molecule has a dimethoxytrityl group. Because the strands form a stable duplex, this dimethoxytrityl group (or an equivalent group, such as other trityl groups or other hydrophobic moieties) is all that is required to purify the pair of oligos, for example, by using a C18 cartridge.

[0314] Standard phosphoramidite synthesis chemistry is used up to the point of introducing a tandem linker, such as an inverted deoxy abasic succinate or glyceryl succinate linker (see FIG. 1) or an equivalent cleavable linker. A non-limiting example of linker coupling conditions that can be used includes a hindered base such as diisopropylethylamine (DIPA) and/or DMAP in the presence of an activator reagent such as Bromotripyrrolidinophosphoniumhexaflurorophosphate (PyBrOP). After the linker is coupled, standard synthesis chemistry is utilized to complete synthesis of the second sequence leaving the terminal the 5′-O-DMT intact. Following synthesis, the resulting oligonucleotide is deprotected according to the procedures described herein and quenched with a suitable buffer, for example with 50 mM NaOAc or 1.5 M NH₄H₂CO₃.

[0315] Purification of the siNA duplex can be readily accomplished using solid phase extraction, for example using a Waters C18 SepPak 1 g cartridge conditioned with 1 column volume (CV) of acetonitrile, 2 CV H₂O, and 2 CV 50 mM NaOAc. The sample is loaded and then washed with 1 CV H₂O or 50 mM NaOAc. Failure sequences are eluted with 1 CV 14% ACN (Aqueous with 50 mM NaOAc and 50 mM NaCl). The column is then washed, for example with 1 CV H₂O followed by on-column detritylation, for example by passing 1 CV of 1% aqueous trifluoroacetic acid (TFA) over the column, then adding a second CV of 1% aqueous TFA to the column and allowing to stand for approximately 10 minutes. The remaining TFA solution is removed and the column washed with H₂O followed by 1 CV 1M NaCl and additional H₂O. The siNA duplex product is then eluted, for example, using 1 CV 20% aqueous CAN.

[0316] FIG. 2 provides an example of MALDI-TOF mass spectrometry analysis of a purified siNA construct in which each peak corresponds to the calculated mass of an individual siNA strand of the siNA duplex. The same purified siNA provides three peaks when analyzed by capillary gel electrophoresis (CGE), one peak presumably corresponding to the duplex siNA, and two peaks presumably corresponding to the separate siNA sequence strands. Ion exchange HPLC analysis of the same siNA contract only shows a single peak. Testing of the purified siNA construct using a luciferase reporter assay described below demonstrated the same RNAi activity compared to siNA constructs generated from separately synthesized oligonucleotide sequence strands.

### Example 2

### Identification of Potential siNA Target Sites in Any RNA Sequence

[0317] The sequence of an RNA target of interest, such as a viral or human mRNA transcript, is screened for target sites, for example by using a computer folding algorithm. In a non-limiting example, the sequence of a gene or RNA gene transcript derived from a database, such as Genbank, is used to generate siNA targets having complementarity to the target. Such sequences can be obtained from a database, or can be determined experimentally as known in the art. Target sites that are known, for example, those target sites determined to be effective target sites based on studies with other nucleic acid molecules, for example ribozymes or antisense, or those targets known to be associated with a disease or condition such as those sites containing mutations or deletions, can be used to design siNA molecules targeting those sites. Various parameters can be used to determine which sites are the most suitable target sites within the target RNA sequence. These parameters include but are not limited to secondary or tertiary RNA structure, the nucleotide base composition of the target sequence, the degree of homology between various regions of the target sequence, or the relative position of the target sequence within the RNA transcript. Based on these determinations, any number of target sites within the RNA transcript can be chosen to screen siNA molecules for efficacy, for example by using in vitro RNA cleavage assays, cell culture, or animal models. In a non-limiting example, anywhere from 1 to 1000 target sites are chosen within the transcript based on the size of the siNA construct to be used. High throughput screening assays can be developed for screening siNA molecules using methods known in the art, such as with multi-well or multi-plate assays to determine efficient reduction in target gene expression.

### Example 3

### Selection of siNA Molecule Target Sites in a RNA

[0318] The following non-limiting steps can be used to carry out the selection of siNAs targeting a given gene sequence or transcript.

[0319] 1. The target sequence is parsed in silico into a list of all fragments or subsequences of a particular length, for example 23 nucleotide fragments, contained within the target sequence. This step is typically carried out using a custom Perl script, but commercial sequence analysis programs such as Oligo, MacVector, or the GCG Wisconsin Package can be employed as well.

[0320] 2. In some instances the siNAs correspond to more than one target sequence; such would be the case for example in targeting different transcripts of the same gene, targeting different transcripts of more than one gene, or for targeting both the human gene and an animal homolog. In this case, a subsequence list of a particular length is generated for each of the targets, and then the lists are compared to find matching sequences in each list. The subsequences are then ranked according to the number of target sequences that contain the given subsequence; the goal is to find subsequences that are present in most or all of the target sequences. Alternately, the ranking can identify subsequences that are unique to a target sequence, such as a mutant target sequence. Such an approach would enable the use of siNA to target specifically the mutant sequence and not effect the expression of the normal sequence.

[0321] 3. In some instances the siNA subsequences are absent in one or more sequences while present in the desired target sequence; such would be the case if the siNA targets a gene with a paralogous family member that is to remain untargeted. As in case 2 above, a subsequence list of a particular length is generated for each of the targets, and then the lists are compared to find sequences that are present in the target gene but are absent in the untargeted paralog.

[0322] 4. The ranked siNA subsequences can be further analyzed and ranked according to GC content. A preference can be given to sites containing 30-70% GC, with a further preference to sites containing 40-60% GC.

[0323] 5. The ranked siNA subsequences can be further analyzed and ranked according to self-folding and internal hairpins. Weaker internal folds are preferred; strong hairpin structures are to be avoided.

[0324] 6. The ranked siNA subsequences can be further analyzed and ranked according to whether they have runs of GGG or CCC in the sequence. GGG (or even more Gs) in either strand can make oligonucleotide synthesis problematic and can potentially interfere with RNAi activity, so it is avoided whenever better sequences are available. CCC is searched in the target strand because that will place GGG in the antisense strand.

[0325] 7. The ranked siNA subsequences can be further analyzed and ranked according to whether they have the dinucleotide UU (uridine dinucleotide) on the 3′-end of the sequence, and/or AA on the 5′-end of the sequence (to yield 3′ UU on the antisense sequence). These sequences allow one to design siNA molecules with terminal TT thymidine dinucleotides.

[0326] 8. Four or five target sites are chosen from the ranked list of subsequences as described above. For example, in subsequences having 23 nucleotides, the right 21 nucleotides of each chosen 23-mer subsequence are then designed and synthesized for the upper (sense) strand of the siNA duplex, while the reverse complement of the left 21 nucleotides of each chosen 23-mer subsequence are then designed and synthesized for the lower (antisense) strand of the siNA duplex (see Tables II and III). If terminal TT residues are desired for the sequence (as described in paragraph 7), then the two 3′ terminal nucleotides of both the sense and antisense strands are replaced by TT prior to synthesizing the oligos.

[0327] 9. The siNA molecules are screened in an in vitro, cell culture or animal model system to identify the most active siNA molecule or the most preferred target site within the target RNA sequence.

[0328] In an alternate approach, a pool of siNA constructs specific to a MAP kinase target sequence is used to screen for target sites in cells expressing MAP kinase (e.g., c-JUN) RNA, such as human kidney fibroblast (e.g., 293 cells), HeLa, or HepG2 cells. The general strategy used in this approach is shown in FIG. 9. A non-limiting example of such as pool is a pool comprising sequences having sense sequences comprising SEQ ID NOs. 1247-1427 and antisense sequences comprising SEQ ID NOs. 1428-1608 respectively. 293, HeLa, or HepG2 cells expressing MAP kinase (e.g., c-JUN) are transfected with the pool of siNA constructs and cells that demonstrate a phenotype associated with MAP kinase (e.g., c-JUN) inhibition are sorted. The pool of siNA constructs can be expressed from transcription cassettes inserted into appropriate vectors (see for example FIG. 7 and FIG. 8). The siNA from cells demonstrating a positive phenotypic change (e.g., decreased proliferation, decreased MAP kinase (e.g., c-JUN) mRNA levels or decreased MAP kinase (e.g., c-JUN) protein expression), are sequenced to determine the most suitable target site(s) within the target MAP kinase (e.g., c-JUN) RNA sequence.

### Example 4

### MAP Kinase Targeted siNA Design

[0329] siNA target sites were chosen by analyzing sequences of the MAP kinase (e.g., c-JUN) RNA target and optionally prioritizing the target sites on the basis of folding (structure of any given sequence analyzed to determine siNA accessibility to the target), by using a library of siNA molecules as described in Example 3, or alternately by using an in vitro siNA system as described in Example 6 herein. siNA molecules were designed that could bind each target and are optionally individually analyzed by computer folding to assess whether the siNA molecule can interact with the target sequence. Varying the length of the siNA molecules can be chosen to optimize activity. Generally, a sufficient number of complementary nucleotide bases are chosen to bind to, or otherwise interact with, the target RNA, but the degree of complementarity can be modulated to accommodate siNA duplexes or varying length or base composition. By using such methodologies, siNA molecules can be designed to target sites within any known RNA sequence, for example those RNA sequences corresponding to the any gene transcript.

[0330] Chemically modified siNA constructs are designed to provide nuclease stability for systemic administration in vivo and/or improved pharmacokinetic, localization, and delivery properties while preserving the ability to mediate RNAi activity. Chemical modifications as described herein are introduced synthetically using synthetic methods described herein and those generally known in the art. The synthetic siNA constructs are then assayed for nuclease stability in serum and/or cellular/tissue extracts (e.g. liver extracts). The synthetic siNA constructs are also tested in parallel for RNAi activity using an appropriate assay, such as a luciferase reporter assay as described herein or another suitable assay that can quantity RNAi activity. Synthetic siNA constructs that possess both nuclease stability and RNAi activity can be further modified and re-evaluated in stability and activity assays. The chemical modifications of the stabilized active siNA constructs can then be applied to any siNA sequence targeting any chosen RNA and used, for example, in target screening assays to pick lead siNA compounds for therapeutic development (see for example FIG. 11).

### Example 5

### Chemical Synthesis and Purification of siNA

[0331] siNA molecules can be designed to interact with various sites in the RNA message, for example, target sequences within the RNA sequences described herein. The sequence of one strand of the siNA molecule(s) is complementary to the target site sequences described above. The siNA molecules can be chemically synthesized using methods described herein. Inactive siNA molecules that are used as control sequences can be synthesized by scrambling the sequence of the siNA molecules such that it is not complementary to the target sequence. Generally, siNA constructs can by synthesized using solid phase oligonucleotide synthesis methods as described herein (see for example Usman et al., U.S. Pat. Nos. 5,804,683; 5,831,071; 5,998,203; 6,117,657; 6,353,098; 6,362,323; 6,437,117; 6,469,158; Scaringe et al., U.S. Pat. Nos. 6,111,086; 6,008,400; 6,111,086 all incorporated by reference herein in their entirety).

[0332] In a non-limiting example, RNA oligonucleotides are synthesized in a stepwise fashion using the phosphoramidite chemistry as is known in the art. Standard phosphoramidite chemistry involves the use of nucleosides comprising any of 5′-O-dimethoxytrityl, 2′-O-tert-butyldimethylsilyl, 3′-O-2-Cyanoethyl N,N-diisopropylphos-phoroamidite groups, and exocyclic amine protecting groups (e.g. N6-benzoyl adenosine, N4 acetyl cytidine, and N2-isobutyryl guanosine). Alternately, 2′-O-Silyl Ethers can be used in conjunction with acid-labile 2′-O-orthoester protecting groups in the synthesis of RNA as described by Scaringe supra. Differing 2′ chemistries can require different protecting groups, for example 2′-deoxy-2′-amino nucleosides can utilize N-phthaloyl protection as described by Usman et al., U.S. Pat. No. 5,631,360, incorporated by reference herein in its entirety).

[0333] During solid phase synthesis, each nucleotide is added sequentially (3′- to 5′ -direction) to the solid support-bound oligonucleotide. The first nucleoside at the 3′-end of the chain is covalently attached to a solid support (e.g., controlled pore glass or polystyrene) using various linkers. The nucleotide precursor, a ribonucleoside phosphoramidite, and activator are combined resulting in the coupling of the second nucleoside phosphoramidite onto the 5′-end of the first nucleoside. The support is then washed and any unreacted 5′-hydroxyl groups are capped with a capping reagent such as acetic anhydride to yield inactive 5′-acetyl moieties. The trivalent phosphorus linkage is then oxidized to a more stable phosphate linkage. At the end of the nucleotide addition cycle, the 5 ′-O-protecting group is cleaved under suitable conditions (e.g., acidic conditions for trityl-based groups and Fluoride for silyl-based groups). The cycle is repeated for each subsequent nucleotide.

[0334] Modification of synthesis conditions can be used to optimize coupling efficiency, for example by using differing coupling times, differing reagent/phosphoramidite concentrations, differing contact times, differing solid supports and solid support linker chemistries depending on the particular chemical composition of the siNA to be synthesized. Deprotection and purification of the siNA can be performed as is generally described in Deprotection and purification of the siNA can be performed as is generally described in Usman et al., U.S. Pat. No. 5,831,071, U.S. Pat. No. 6,353,098, U.S. Pat. No. 6,437,117, and Bellon et al., U.S. Pat. No. 6,054,576, U.S. Pat. No. 6,162,909, U.S. Pat. No. 6,303,773, or Scaringe supra, incorporated by reference herein in their entireties. Additionally, deprotection conditions can be modified to provide the best possible yield and purity of siNA constructs. For example, applicant has observed that oligonucleotides comprising 2′-deoxy-2′-fluoro nucleotides can degrade under inappropriate deprotection conditions. Such oligonucleotides are deprotected using aqueous methylamine at about 35° C. for 30 minutes. If the 2′-deoxy-2′-fluoro containing oligonucleotide also comprises ribonucleotides, after deprotection with aqueous methylamine at about 35° C. for 30 minutes, TEA-HF is added and the reaction maintained at about 65° C. for an additional 15 minutes.

### Example 6

### RNAi in Vitro Assay to Assess siNA Activity

[0335] An in vitro assay that recapitulates RNAi in a cell-free system is used to evaluate siNA constructs targeting MAP kinase (e.g., c-JUN) RNA targets. The assay comprises the system described by Tuschl et al., 1999, Genes and Development, 13, 3191-3197 and Zamore et al., 2000, Cell, 101, 25-33 adapted for use with MAP kinase target RNA. A Drosophila extract derived from syncytial blastoderm is used to reconstitute RNAi activity in vitro. Target RNA is generated via in vitro transcription from an appropriate MAP kinase expressing plasmid using T7 RNA polymerase or via chemical synthesis as described herein. Sense and antisense siNA strands (for example 20 μM each) are annealed by incubation in buffer (such as 100 mM potassium acetate, 30 mM HEPES-KOH, pH 7.4, 2 mM magnesium acetate) for 1 minute at 90° C. followed by 1 hour at 37° C., then diluted in lysis buffer (for example 100 mM potassium acetate, 30 mM HEPES-KOH at pH 7.4, 2 mM magnesium acetate). Annealing can be monitored by gel electrophoresis on an agarose gel in TBE buffer and stained with ethidium bromide. The Drosophila lysate is prepared using zero to two-hour-old embryos from Oregon R flies collected on yeasted molasses agar that are dechorionated and lysed. The lysate is centrifuged and the supernatant isolated. The assay comprises a reaction mixture containing 50% lysate [vol/vol], RNA (10-50 pM final concentration), and 10% [vol/vol] lysis buffer containing siNA (10 nM final concentration). The reaction mixture also contains 10 mM creatine phosphate, 10 ug.ml creatine phosphokinase, 100 um GTP, 100 uM UTP, 100 uM CTP, 500 uM ATP, 5 mM DTT, 0.1 U/uL RNasin (Promega), and 100 uM of each amino acid. The final concentration of potassium acetate is adjusted to 100 mM. The reactions are pre-assembled on ice and preincubated at 25° C. for 10 minutes before adding RNA, then incubated at 25° C. for an additional 60 minutes. Reactions are quenched with 4 volumes of 1.25×Passive Lysis Buffer (Promega). Target RNA cleavage is assayed by RT-PCR analysis or other methods known in the art and are compared to control reactions in which siNA is omitted from the reaction.

[0336] Alternately, internally-labeled target RNA for the assay is prepared by in vitro transcription in the presence of [alpha-³²P] CTP, passed over a G 50 Sephadex column by spin chromatography and used as target RNA without further purification. Optionally, target RNA is 5′-³²P-end labeled using T4 polynucleotide kinase enzyme. Assays are performed as described above and target RNA and the specific RNA cleavage products generated by RNAi are visualized on an autoradiograph of a gel. The percentage of cleavage is determined by Phosphor Imager® quantitation of bands representing intact control RNA or RNA from control reactions without siNA and the cleavage products generated by the assay.

[0337] In one embodiment, this assay is used to determine target sites the MAP kinase RNA target for siNA mediated RNAi cleavage, wherein a plurality of siNA constructs are screened for RNAi mediated cleavage of the MAP kinase RNA target, for example, by analyzing the assay reaction by electrophoresis of labeled target RNA, or by northern blotting, as well as by other methodology well known in the art.

### Example 7

### Nucleic Acid Inhibition of MAP Kinase Target RNA in Vivo

[0338] siNA molecules targeted to the human MAP kinase (e.g., c-JUN) RNA are designed and synthesized as described above. These nucleic acid molecules can be tested for cleavage activity in vivo, for example, using the following procedure. The target sequences and the nucleotide location within the MAP kinase (e.g., c-JUN) RNA are given in Table II and III.

[0339] Two formats are used to test the efficacy of siNAs targeting MAP kinase (e.g., c-JUN). First, the reagents are tested in cell culture, for example using cultured human kidney fibroblast cells (e.g., 293, HeLa, or HepG2 cells), to determine the extent of RNA and protein inhibition. siNA reagents (e.g.; see Tables II and III) are selected against the MAP kinase (e.g., c-JUN) target as described herein. RNA inhibition is measured after delivery of these reagents by a suitable transfection agent to, for example, 293, HeLa, or HepG2 cells. Relative amounts of target RNA are measured versus actin using real-time PCR monitoring of amplification (e.g., ABI 7700 Taqman®). A comparison is made to a mixture of oligonucleotide sequences made to unrelated targets or to a randomized siNA control with the same overall length and chemistry, but randomly substituted at each position. Primary and secondary lead reagents are chosen for the target and optimization performed. After an optimal transfection agent concentration is chosen, a RNA time-course of inhibition is performed with the lead siNA molecule. In addition, a cell-plating format can be used to determine RNA inhibition.

Delivery of siNA to Cells

[0340] Cells (e.g., 293, HeLa, or HepG2 cells) are seeded, for example, at 1×10⁵ cells per well of a six-well dish in EGM-2 (BioWhittaker) the day before transfection. siNA (final concentration, for example 20 nM) and cationic lipid (e.g., final concentration 2 μg/ml) are complexed in EGM basal media (Biowhittaker) at 37° C. for 30 mins in polystyrene tubes. Following vortexing, the complexed siNA is added to each well and incubated for the times indicated. For initial optimization experiments, cells are seeded, for example, at 1×10³ in 96 well plates and siNA complex added as described. Efficiency of delivery of siNA to cells is determined using a fluorescent siNA complexed with lipid. Cells in 6-well dishes are incubated with siNA for 24 hours, rinsed with PBS and fixed in 2% paraformaldehyde for 15 minutes at room temperature. Uptake of siNA is visualized using a fluorescent microscope.

Tagman and Lightcycler Quantification of mRNA

[0341] Total RNA is prepared from cells following siNA delivery, for example using Qiagen RNA purification kits for 6-well or Rneasy extraction kits for 96-well assays. For Taqman analysis, dual-labeled probes are synthesized with the reporter dye, FAM or JOE, covalently linked at the 5′-end and the quencher dye TAMRA conjugated to the 3′-end. One-step RT-PCR amplifications are performed on, for example, an ABI PRISM 7700 Sequence Detector using 50 μl reactions consisting of 10 μl total RNA, 100 nM forward primer, 900 nM reverse primer, 100 nM probe, 1× TaqMan PCR reaction buffer (PE-Applied Biosystems), 5.5 mM MgCl₂, 300 μM each dATP, dCTP, dGTP, and dTTP, 10 U RNase Inhibitor (Promega), 1.25 U AmpliTaq Gold (PE-Applied Biosystems) and 10 U M-MLV Reverse Transcriptase (Promega). The thermal cycling conditions can consist of 30 min at 48° C., 10 min at 95° C., followed by 40 cycles of 15 sec at 95° C. and 1 min at 60° C. Quantitation of mRNA levels is determined relative to standards generated from serially diluted total cellular RNA (300, 100, 33, 11 ng/rxn) and normalizing to β-actin or GAPDH mRNA in parallel TaqMan reactions. For each gene of interest an upper and lower primer and a fluorescently labeled probe are designed. Real time incorporation of SYBR Green I dye into a specific PCR product can be measured in glass capillary tubes using a lightcyler. A standard curve is generated for each primer pair using control c RNA allularnd values are represented as relative expression to GAPDH in each sample.

Western Blotting

[0342] Nuclear extracts can be prepared using a standard micro preparation technique (see for example Andrews and Faller, 1991, Nucleic Acids Research, 19, 2499). Protein extracts from supernatants are prepared, for example using TCA precipitation. An equal volume of 20% TCA is added to the cell supernatant, incubated on ice for 1 hour and pelleted by centrifugation for 5 minutes. Pellets are washed in acetone, dried and resuspended in water. Cellular protein extracts are run on a 10% Bis-Tris NuPage (nuclear extracts) or 4-12% Tris-Glycine (supernatant extracts) polyacrylamide gel and transferred onto nitro-cellulose membranes. Non-specific binding can be blocked by incubation, for example, with 5% non-fat milk for 1 hour followed by primary antibody for 16 hour at 4° C. Following washes, the secondary antibody is applied, for example (1:10,000 dilution) for 1 hour at room temperature and the signal detected with SuperSignal reagent (Pierce).

### Example 8

### Models Useful to Evaluate the Down-regulation of MAP Kinase Gene (e.g., c-JUN, ERK1, ERK2, JNK, JK2 and/or p38) Expression

Cell Culture

[0343] There are numerous cell culture systems that can be used to analyze reduction of MAP kinase levels either directly or indirectly by measuring downstream effects. For example, cultured human kidney fibroblast cells (e.g., 293 cells), HeLa, or HepG2 cells can be used in cell culture experiments to assess the efficacy of nucleic acid molecules of the invention. As such, cells treated with nucleic acid molecules of the invention (e.g., siNA) targeting MAP kinase RNA would be expected to have decreased MAP kinase expression capacity compared to matched control nucleic acid molecules having a scrambled or inactive sequence. In a non-limiting example, 293, HeLa, or HepG2 cells are cultured and MAP kinase expression is quantified, for example by time-resolved immuno fluorometric assay. MAP kinase messenger-RNA expression is quantitated with RT-PCR in cultured cells. Untreated cells are compared to cells treated with siNA molecules transfected with a suitable reagent, for example a cationic lipid such as lipofectamine, and MAP kinase protein and RNA levels are quantitated. Dose response assays are then performed to establish dose dependent inhibition of MAP kinase expression. In another non-limiting example, cell culture experiments are carried out as described by Aguirre et al., 2000, J. Biol. Chem., 275, 9047-9054.

[0344] In several cell culture systems, cationic lipids have been shown to enhance the bioavailability of oligonucleotides to cells in culture (Bennet, et al., 1992, Mol. Pharmacology, 41, 1023-1033). In one embodiment, siNA molecules of the invention are complexed with cationic lipids for cell culture experiments. siNA and cationic lipid mixtures are prepared in serum-free DMEM immediately prior to addition to the cells. DMEM plus additives are warmed to room temperature (about 20-25° C.) and cationic lipid is added to the final desired concentration and the solution is vortexed briefly. siNA molecules are added to the final desired concentration and the solution is again vortexed briefly and incubated for 10 minutes at room temperature. In dose response experiments, the RNA/lipid complex is serially diluted into DMEM following the 10 minute incubation.

Animal Models

[0345] Evaluating the efficacy of anti-MAP kinase agents in animal models is an important prerequisite to human clinical trials. Obesity and type 2 diabetes are the most prevalent and serious metabolic diseases in that they affect more than 50% of adults in the USA. These conditions are associated with a chronic inflammatory response characterized by abnormal inflammatory cytokine production, increased acute-phase reactants and other stress-induced molecules. Many of these alterations seem to be initiated and to reside within adipose tissue. Elevated production of tumour necrosis factor (TNF)-alpha by adipose tissue decreases sensitivity to insulin and has been detected in several experimental obesity models and obese humans. Free fatty acids (FFAs) are also implicated in the etiology of obesity-induced insulin resistance and diabetes. Because both TNF-alpha and FFAs are potent MAP kinase activators, Hirosumi et al., 2002, Nature, 420, 333-336 determined whether obesity is associated with alterations in stress-activated and inflammatory responses through this pathway and whether MAP kinases are causally linked to aberrant metabolic control in this state. In this study, Hirosumi et al., describe dietary and genetic (ob/ob) mouse models of obesity useful in evaluating MAP kinase gene expression. Such transgenic mice are useful as models for obesity and insulin resistance and can be used to identify nucleic acid molecules of the invention that modulate MAP kinase gene (e.g., ERK1, ERK2, JNK1, JNK2, and/or p38) expression and gene function toward therapeutic use in treating obesity and insulin resistance (e.g. type I and II diabetes).

[0346] The role of c-JUN in liver cancer has recently been investigated (Efer1 et al., 2003, Cell, 112, 181). These investigators deleted c-JUN and then induced liver cancer by chemical carcinogenesis. They observed that deletion of c-JUN dramatically interfered with liver tumor formation. Animal survival was markedly worse in c-JUN wildtype animals relative to deletion mutants. In particular, the number of apoptotic cells increased about five fold in tumors in the c-JUN deletion strain relative to the wildtype animals. Importantly, levels of the pro-apoptotic gene products such as p53 and noxa were elevated in the c-JUN deletion strain. c-JUN is likely to antagonize other pro-apoptotic genes such as TNF-a. Thus, by blocking p53 and its large family of dependent genes, c-JUN seems to promote tumor formation. Since a large fraction of chronically infected HCV patients develop hepatocellular carcinoma, c-JUN provides an attractive target for treating HCV infected patients to prevent or ameliorate hepatocellular carcinoma. The animal model described by Eferl et al., supra, can be used to evaluate siNA molecules of the invention for efficacy in inhibiting c-JUN expression in liver toward therapeutic use in preventing and/or treating hepatocellular carcinoma in human subjects.

[0347] Because mitogen activated protein kinases (MAP kinases) are constituents of numerous signal transduction pathways, and are activated by protein kinase cascades, intense efforts are under way to develop and evaluate compounds that target components of MAPK pathways. Several of these inhibitors are effective in animal models of disease and have advanced to clinical trials for the treatment of inflammatory diseases, metabolic diseases, autoimmune diseases and cancer. The clinical utility of specifically targeting MAP kinase genes (e.g., c-JUN, ERK1, ERK2, JNK1, JNK2, and/or p38) can be studied in animal models and clinical studies of inflammatory diseases, metabolic diseases, autoimmune diseases and cancer (see for example English et al, 2002, Trends in Pharmacological Sciences, 23, 40-45).

### Example 9

### RNAi Mediated Inhibition of p38 RNA Expression

[0348] siNA constructs are tested for efficacy in reducing p38 RNA expression in, for example in A549 cells. Cells are plated approximately 24 hours before transfection in 96-well plates at 5,000-7,500 cells/well, 100 μl/well, such that at the time of transfection cells are 70-90% confluent. For transfection, annealed siNAs are mixed with the transfection reagent (Lipofectamine 2000, Invitrogen) in a volume of 50 μl/well and incubated for 20 minutes at room temperature. The siNA transfection mixtures are added to cells to give a final siNA concentration of 25 nM in a volume of 150 μl. Each siNA transfection mixture is added to 3 wells for triplicate siNA treatments. Cells are incubated at 37° for 24 hours in the continued presence of the siNA transfection mixture. At 24 hours, RNA is prepared from each well of treated cells. The supernatants with the transfection mixtures are first removed and discarded, then the cells are lysed and RNA prepared from each well. Target gene expression following treatment is evaluated by RT-PCR for the target gene and for a control gene (36B4, an RNA polymerase subunit) for normalization. The triplicate data is averaged and the standard deviations determined for each treatment. Normalized data are graphed and the percent reduction of target mRNA by active siNAs in comparison to their respective inverted control siNAs was determined.

[0349] In a non-limiting example, siNA constructs were screened for activity (see FIG. 12) and compared to untreated cells, scrambled siNA control constructs (Scram1 and Scram2), and cells transfected with lipid alone (transfection control). As shown in FIG. 12, the siNA constructs significantly reduce p38 RNA expression. Leads generated from such a screen are then further assayed. In a non-limiting example, siNA constructs comprising chemical modifications described herein (e.g., having modifications comprising Formulae I-VII and/or those modifications described in Table IV are assayed for activity. These siNA constructs are compared to appropriate matched chemistry inverted controls. In addition, the siNA constructs are also compared to untreated cells, cells transfected with lipid and scrambled siNA constructs, and cells transfected with lipid alone (transfection control).

### Example 10

### RNAi Mediated Inhibition of p38 RNA Expression

[0350] siNA constructs are tested for efficacy in reducing JNK1 RNA expression in, for example in A549 cells. Cells are plated approximately 24 hours before transfection in 96-well plates at 5,000-7,500 cells/well, 100 μl/well, such that at the time of transfection cells are 70-90% confluent. For transfection, annealed siNAs are mixed with the transfection reagent (Lipofectamine 2000, Invitrogen) in a volume of 50 μl/well and incubated for 20 minutes at room temperature. The siNA transfection mixtures are added to cells to give a final siNA concentration of 25 nM in a volume of 150 μl. Each siNA transfection mixture is added to 3 wells for triplicate siNA treatments. Cells are incubated at 37° for 24 hours in the continued presence of the siNA transfection mixture. At 24 hours, RNA is prepared from each well of treated cells. The supernatants with the transfection mixtures are first removed and discarded, then the cells are lysed and RNA prepared from each well. Target gene expression following treatment is evaluated by RT-PCR for the target gene and for a control gene (36B4, an RNA polymerase subunit) for normalization. The triplicate data is averaged and the standard deviations determined for each treatment. Normalized data are graphed and the percent reduction of target mRNA by active siNAs in comparison to their respective inverted control siNAs was determined.

[0351] In a non-limiting example, siNA constructs were screened for activity (see FIG. 13) and compared to untreated cells, scrambled siNA control constructs (Scram1 and Scram2), and cells transfected with lipid alone (transfection control). As shown in FIG. 13, the siNA constructs significantly reduce p38 RNA expression. Leads generated from such a screen are then further assayed. In a non-limiting example, siNA constructs comprise chemical modifications described herein (e.g., having modifications comprising Formulae I-VII and/or those modifications described in Table IV are assayed for activity). These siNA constructs are compared to appropriate matched chemistry inverted controls. In addition, the siNA constructs are also compared to untreated cells, cells transfected with lipid and scrambled siNA constructs, and cells transfected with lipid alone (transfection control).

### Example 11

### Indications

[0352] The present body of knowledge in MAP kinase research indicates the need for methods and compounds that can regulate MAP kinase gene (e.g., c-JUN, ERK1, ERK2, JNK1, JNK2, and/or p38) product expression for research, diagnostic, and therapeutic use. As described herein, the nucleic acid molecules of the present invention can be used to treat obesity and insulin resistance (e.g. type I and II diabetes), oncology and proliferation related indications and conditions, including cancers of the lung, bladder, colon, breast, prostate, retina, larynx, esophagus, liver (e.g., hepatocellular carcinoma), and ovary, along with lymphomas, melanomas and glioblastomas, inflammatory disorders such as asthma, septic shock, rheumatoid arthritis, psoriasis, inflammatory bowl syndrome and any other disease that responds to modulation of MAP kinase expression.

[0353] Troglitazone, insulin, and PTP-1B modulators are non-limiting examples of pharmaceutical agents that can be combined with or used in conjunction with the nucleic acid molecules (e.g. siNA molecules) of the instant invention for treating obesity and diabetes. The use of radiation treatments and chemotherapeutics such as Gemcytabine and cyclophosphamide are non-limiting examples of chemotherapeutic agents that can also be combined with or used in conjunction with the nucleic acid molecules (e.g. siNA molecules) of the instant invention for oncology therapeutic applications. Those skilled in the art will recognize that other anti-cancer compounds and therapies can be similarly be readily combined with the nucleic acid molecules of the instant invention (e.g. siNA molecules) and are hence within the scope of the instant invention. Such compounds and therapies are well known in the art (see for example Cancer: Principles and Practice of Oncology, Volumes 1 and 2, eds Devita, V. T., Hellman, S., and Rosenberg, S. A., J. B. Lippincott Company, Philadelphia, USA; incorporated herein by reference) and include, without limitations, folates, antifolates, pyrimidine analogs, fluoropyrimidines, purine analogs, adenosine analogs, topoisomerase I inhibitors, anthrapyrazoles, retinoids, antibiotics, anthacyclins, platinum analogs, alkylating agents, nitrosoureas, plant derived compounds such as vinca alkaloids, epipodophyllotoxins, tyrosine kinase inhibitors, taxols, radiation therapy, surgery, nutritional supplements, gene therapy, radiotherapy, for example 3D-CRT, immunotoxin therapy, for example ricin, and monoclonal antibodies. Specific examples of chemotherapeutic compounds that can be combined with or used in conjunction with the nucleic acid molecules of the invention include, but are not limited to, Paclitaxel; Docetaxel; Methotrexate; Doxorubin; Edatrexate; Vinorelbine; Tamoxifen; Leucovorin; 5-fluoro uridine (5-FU); Ionotecan; Cisplatin; Carboplatin; Amsacrine; Cytarabine; Bleomycin; Mitomycin C; Dactinomycin; Mithramycin; Hexamethylmelamine; Dacarbazine; L-asperginase; Nitrogen mustard; Melphalan, Chlorambucil; Busulfan; Ifosfamide; 4-hydroperoxycyclophosphamide, Thiotepa; Irinotecan (CAMPTOSAR®, CPT-11, Camptothecin-11, Campto) Tamoxifen, Herceptin; IMC C225; ABX-EGF: and combinations thereof are non-limiting examples of compounds and/or methods that can be combined with or used in conjunction with the nucleic acid molecules (e.g. siNA) of the instant invention. In addition, treatment of HCV infected subjects with siNA molecules of the invention targeting c-JUN or other MAP kinases involved in the maintenance or development of hepatocellular carcinoma can be combined with anti-viral compounds, such as siNA molecules targeting HCV RNA or other antiviral compounds known in the art (e.g., interferons, nucleoside analogs etc.). Those skilled in the art will recognize that other drug compounds and therapies can be similarly be readily combined with the nucleic acid molecules of the instant invention (e.g., siNA molecules) are hence within the scope of the instant invention.

### Example 12

### Diagnostic Uses

[0354] The siNA molecules of the invention can be used in a variety of diagnostic applications, such as in the identification of molecular targets (e.g., RNA) in a variety of applications, for example, in clinical, industrial, environmental, agricultural and/or research settings. Such diagnostic use of siNA molecules involves utilizing reconstituted RNAi systems, for example, using cellular lysates or partially purified cellular lysates. siNA molecules of this invention can be used as diagnostic tools to examine genetic drift and mutations within diseased cells or to detect the presence of endogenous or exogenous, for example viral, RNA in a cell. The close relationship between siNA activity and the structure of the target RNA allows the detection of mutations in any region of the molecule, which alters the base-pairing and three-dimensional structure of the target RNA. By using multiple siNA molecules described in this invention, one can MAP nucleotide changes, which are important to RNA structure and function in vitro, as well as in cells and tissues. Cleavage of target RNAs with siNA molecules can be used to inhibit gene expression and define the role of specified gene products in the progression of disease or infection. In this manner, other genetic targets can be defined as important mediators of the disease. These experiments will lead to better treatment of the disease progression by affording the possibility of combination therapies (e.g., multiple siNA molecules targeted to different genes, siNA molecules coupled with known small molecule inhibitors, or intermittent treatment with combinations siNA molecules and/or other chemical or biological molecules). Other in vitro uses of siNA molecules of this invention are well known in the art, and include detection of the presence of mRNAs associated with a disease, infection, or related condition. Such RNA is detected by determining the presence of a cleavage product after treatment with a siNA using standard methodologies, for example, fluorescence resonance emission transfer (FRET).

[0355] In a specific example, siNA molecules that cleave only wild-type or mutant forms of the target RNA are used for the assay. The first siNA molecules (i.e., those that cleave only wild-type forms of target RNA) are used to identify wild-type RNA present in the sample and the second siNA molecules (i.e., those that cleave only mutant forms of target RNA) are used to identify mutant RNA in the sample. As reaction controls, synthetic substrates of both wild-type and mutant RNA are cleaved by both siNA molecules to demonstrate the relative siNA efficiencies in the reactions and the absence of cleavage of the “non-targeted” RNA species. The cleavage products from the synthetic substrates also serve to generate size markers for the analysis of wild-type and mutant RNAs in the sample population. Thus, each analysis requires two siNA molecules, two substrates and one unknown sample, which is combined into six reactions. The presence of cleavage products is determined using an RNase protection assay so that full-length and cleavage fragments of each RNA can be analyzed in one lane of a polyacrylamide gel. It is not absolutely required to quantify the results to gain insight into the expression of mutant RNAs and putative risk of the desired phenotypic changes in target cells. The expression of mRNA whose protein product is implicated in the development of the phenotype (i.e., disease related or infection related) is adequate to establish risk. If probes of comparable specific activity are used for both transcripts, then a qualitative comparison of RNA levels is adequate and decreases the cost of the initial diagnosis. Higher mutant form to wild-type ratios are correlated with higher risk whether RNA levels are compared qualitatively or quantitatively.

[0356] All patents and publications mentioned in the specification are indicative of the levels of skill of those skilled in the art to which the invention pertains. All references cited in this disclosure are incorporated by reference to the same extent as if each reference had been incorporated by reference in its entirety individually.

[0357] One skilled in the art would readily appreciate that the present invention is well adapted to carry out the objects and obtain the ends and advantages mentioned, as well as those inherent therein. The methods and compositions described herein as presently representative of preferred embodiments are exemplary and are not intended as limitations on the scope of the invention. Changes therein and other uses will occur to those skilled in the art, which are encompassed within the spirit of the invention, are defined by the scope of the claims.

[0358] It will be readily apparent to one skilled in the art that varying substitutions and modifications can be made to the invention disclosed herein without departing from the scope and spirit of the invention. Thus, such additional embodiments are within the scope of the present invention and the following claims. The present invention teaches one skilled in the art to test various combinations and/or substitutions of chemical modifications described herein toward generating nucleic acid constructs with improved activity for mediating RNAi activity. Such improved activity can comprise improved stability, improved bioavailability, and/or improved activation of cellular responses mediating RNAi. Therefore, the specific embodiments described herein are not limiting and one skilled in the art can readily appreciate that specific combinations of the modifications described herein can be tested without undue experimentation toward identifying siNA molecules with improved RNAi activity.

[0359] The invention illustratively described herein suitably can be practiced in the absence of any element or elements, limitation or limitations that are not specifically disclosed herein. Thus, for example, in each instance herein any of the terms “comprising”, “consisting essentially of”, and “consisting of” may be replaced with either of the other two terms. The terms and expressions which have been employed are used as terms of description and not of limitation, and there is no intention that in the use of such terms and expressions of excluding any equivalents of the features shown and described or portions thereof, but it is recognized that various modifications are possible within the scope of the invention claimed. Thus, it should be understood that although the present invention has been specifically disclosed by preferred embodiments, optional features, modification and variation of the concepts herein disclosed may be resorted to by those skilled in the art, and that such modifications and variations are considered to be within the scope of this invention as defined by the description and the appended claims.

[0360] In addition, where features or aspects of the invention are described in terms of Markush groups or other grouping of alternatives, those skilled in the art will recognize that the invention is also thereby described in terms of any individual member or subgroup of members of the Markush group or other group.

TABLE I
MAP kinase Accession Numbers

| | |
|---|---|
| NM_002745 | Homo sapiens mitogen-activated protein kinase 1 (MAPK1), transcript variant 1, mRNA. |
| NM_138957 | Homo sapiens mitogen-activated protein kinase 1 (MAPK1), transcript variant 2, mRNA. |
| X60188 | Human ERKi mRNA for protein serine/threonine kinase (MAPK3). |
| XM_055766 | Homo sapiens mitogen-activated protein kinase 3 (MAPK3), mRNA |
| NM_002747 | Homo sapiens mitogen-activated protein kinase 4 (MAPK4), mRNA |
| | Homo sapiens Mitogen-activated protein kinase 4 (Extracellular signal-regulated kinase 4) (ERK-4) (MAP kinase |
| NM_165662 | isoform p63) (p63-MAPK) (LOC22013 1), mRNA |
| NM_002748 | Homo sapiens mitogen-activated protein kinase 6 (MAPK6), mRNA. |
| | Homo sapiens Mitogen-activated protein kinase 6 (Extracellular signal-regulated kinase 3) (ERK-3) (MAP kinase |
| XM_166057 | isoform p97) (p97-MAPK) (LOC220839), mRNA |
| XM_035575 | Homo sapiens mitogen-activated protein kinase 6 (MAPK6), mRNA |
| NM_139033 | Homo sapiens mitogen-activated protein kinase 7 (MAPK7), transcript variant 1, mRNA |
| NM_139032 | Homo sapiens mitogen-activated protein kinase 7 (MAPK7), transcript variant 2, mRNA |
| NM_002749 | Homo sapiens mitogen-activated protein kinase 7 (MAPK7), transcript variant 3, mRNA |
| NM_139034 | Homo sapiens mitogen-activated protein kinase 7 (MAPK7), transcript variant 4, mRNA |
| NM_139049 | Homo sapiens mitogen-activated protein kinase 8 (MAPK8), transcript variant 1, mRNA. |
| NM_002750 | Homo sapiens mitogen-activated protein kinase 8 (MAPK8), transcript variant 2, mRNA. |
| NM_139046 | Homo sapiens mitogen-activated protein kinase 8 (MAPK8), transcript variant 3, mRNA. |
| NM_139047 | Homo sapiens mitogen-activated protein kinase 8 (MAPK8), transcript variant 4, mRNA. |
| NM_002752 | Homo sapiens mitogen-activated protein kinase 9 (MAPK9), transcript variant 1, mRNA. |
| NM_139068 | Homo sapiens mitogen-activated protein kinase 9 (MAPK9), transcript variant 2, mRNA. |
| NM_139069 | Homo sapiens mitogen-activated protein kinase 9 (MAPK9), transcript variant 3, mRNA. |
| NM_139070 | Homo sapiens mitogen-activated protein kinase 9 (MAPK9), transcript variant 4, mRNA. |
| NM_002753 | Homo sapiens mitogen-activated protein kinase 10 (MAPK10), transcript variant 1, mRNA |
| NM_138982 | Homo sapiens mitogen-activated protein kinase 10 (MAPK10), transcript variant 2, mRNA |
| NM_138980 | Homo sapiens mitogen-activated protein kinase 10 (MAPK10), transcript variant 3, mRNA |
| NM_138981 | Homo sapiens mitogen-activated protein kinase 10 (MAPK10), transcript variant 4, mRNA |
| NM_002751 | Homo sapiens mitogen-activated protein kinase 11 (MAPK11), transcript variant 1, mRNA |
| NM_138993 | Homo sapiens mitogen-activated protein kinase 11 (MAPK11), transcript variant 2, mRNA. |
| NM_002969 | Homo sapiens mitogen-activated protein kinase 12 (MAPK12), mRNA. |
| NM_002754 | Homo sapiens mitogen-activated protein kinase 13 (MAPK13), mRNA. |
| NM_001315 | Homo sapiens mitogen-activated protein kinase 14 (MAPK14), transcript variant 1, mRNA. |
| NM_139012 | Homo sapiens mitogen-activated protein kinase 14 (MAPK14), transcript variant 2, mRNA. |
| NM_139013 | Homo sapiens mitogen-activated protein kinase 14 (MAPK14), transcript variant 3, mRNA. |
| NM_139014 | Homo sapiens mitogen-activated protein kinase 14 (MAPK14), transcript variant 4, mRNA. |
| NM_002755 | Homo sapiens mitogen-aetivated protein kinase kinase 1 (MAP2K1), mRNA |
| NM_030662 | Homo sapiens mitogen-activated protein kinase kinase 2 (MAP2K2), mRNA |
| NM_002756 | Homo sapiens mitogen-activated protein kinase kinase 3 (MAP2K3), transcript variant A, mRNA |
| NM_145109 | Homo sapiens mitogen-activated protein kinase kinase 3 (MAP2K3), transcript variant B, mRNA |
| NM_145110 | Homo sapiens mitogen-activated protein kinase kinase 3 (MAP2K3), transcript variant C, mRNA |
| XM_008654 | Homo sapiens mitogen-activated protein kinase kinase 4 (MAP2K4), mRNA |
| NM_003010 | Homo sapiens mitogen-activated protein kinase kinase 4 (MAP2K4), mRNA |
| NM_145160 | Homo sapiens mitogen-activated protein kinase kinase 5 (MAP2K5), transcript variant A, mRNA |
| NM_002757 | Homo sapiens mitogen-activated protein kinase kinase 5 (MAP2K5), transcript variant B, mRNA |
| NM_145161 | Homo sapiens mitogen-aetivated protein kinase kinase 5 (MAP2K5), transcript variant C, mRNA |
| NM_145162 | Homo sapiens mitogen-aetivated protein kinase kinase 5 (MAP2K5), transcript variant D, mRNA |
| XM_113313 | Homo sapiens mitogen-activated protein kinase kinase 6 (MAP2K6), mRNA |
| NM_002758 | Homo sapiens mitogen-activated protein kinase kinase 6 (MAP2K6), transcript variant 1, mRNA |
| NM_031988 | Homo sapiens mitogen-activated protein kinase kinase 6 (MAP2K6), transcript variant 2, mRNA |
| NM_005043 | Homo sapiens mitogen-activated protein kinase kinase 7 (MAP2K7), transcript variant A, mRNA |
| NM_145185 | Homo sapiens mitogen-activated protein kinase kinase 7 (MAP2K7), transcript variant B, mRNA |
| NM_145329 | Homo sapiens mitogen-activated protein kinase kinase 7 (MAP2K7), transcript variant C, mRNA |
| AF042838 | Homo sapiens mitogeh-activated protein kinase kinase kinase 1 (MAP3K1), mRNA |
| NM_006609 | Homo sapiens mitogen-aetivated protein kinase kinase kinase 2 (MAP3K2), mRNA |
| NM_002401 | Homo sapiens mitogen-activated protein kinase kinase kinase 3 (MAP3K3), mRNA |
| NM_005922 | Homo sapiens mitogen-activated protein kinase kinase kinase 4 (MAP3K4), transcript variant 1, mRNA |
| NM_006724 | Homo sapiens mitogen-activated protein kinase kinase kinase 4 (MAP3K4), transcript variant 2, mRNA |
| NM_005923 | Homo sapiens mitogen-activated protein kinase kinase kinase 5 (MAP3K5), mRNA |
| NM_004672 | Homo sapiens mitogen-activated protein kinase kinase kinase 6 (MAP3K6), mRNA |
| NM_003188 | Homo sapiens mitogen-activated protein kinase kinase kinase 7 (MAP3K7), mRNA |
| NM_005204 | Homo sapiens mitogen-activated protein kinase kinase kinase 8 (MAP3K8), mRNA |
| AF251442 | Homo sapiens mitogen-activated protein kinase kinase kinase 9 (MAP3K9), mRNA |
| NM_002446 | Homo sapiens mitogen-activated protein kinase kinase kinase 10 (MAP3K10), mRNA |
| NM_002419 | Homo sapiens mitogen-activated protein kinase kinase kinase 11 (MAP3K11), mRNA |
| NM_006301 | Homo sapiens mitogen-activated protein kinase kinase kinase 12 (MAP3K12), mRNA |
| NM_004721 | Homo sapiens mitogen-activated protein kinase kinase kinase 13 (MAP3K13), mRNA |
| NM_003954 | Homo sapiens mitogen-activated protein kinase kinase kinase 14 (MAP3K14), mRNA |
| NM_007181 | Homo sapiens mitogen-activated protein kinase kinase kinase kinase 1 (MAP4K1), mRNA |
| NM_004579 | Homo sapiens mirogen-activated protein kinase kinase kinase kinase 2 (MAP4K2), mRNA |
| NM_003618 | Homo sapiens mitogen-activated protein kinase kinase kinase kinase 3 (MAP4K3), mRNA |
| NM_004834 | Homo sapiens mitogen-activated protein kinase kinase kinase kinase 4 (MAP4K4), mRNA |
| NM_006575 | Homo sapiens mitogen-activated protein kinase kinase kinase kinase 5 (MAP4K5), mRNA |
| NM_003668 | Homo sapiens mitogen-activated protein kinase-activated protein kinase 5 (MAPKAPK5), transcript variant 1, mRNA |
| NM_139078 | Homo sapiens mitogen-activated protein kinase-activated protein kinase 5 (MAPKAPK5), transcript variant 2, mRNA |
| NM_004635 | Homo sapiens mitogen-activated protein kinase-activated protein kinase 3 (MAPKAPK3), mRNA |
| NM_004759 | Homo sapiens mitogen-activated protein kinase-activated protein kinase 2 (MAPKAPK2), transcript variant 1, mRNA |
| NM_032960 | Homo sapiens mitogen-activated protein kinase-activated protein kinase 2 (MAPKAPK2), transcript variant 2, mRNA |
| NM_005373 | Homo sapiens myeloproliferative leukemia virus oncogene (MPL), mRNA |
| NM_016848 | Homo sapiens neuronal Shc (SHC3), mRNA |
| NM_002649 | Homo sapiens phosphoinositide-3-kinase, catalytic, gamma polypeptide (PIK3CG), mRNA |
| NM_021003 | Homo sapiens protein phosphatase 1A (formerly 2C), magnesium-dependent, alpha isoform (PPMIA), mRNA |
| NM_003942 | Homo sapiens ribosomal protein S6 kinase, 90kD, polypeptide 4 (RPS6KA4), mRNA |
| NM_004755 | Homo sapiens ribosomal protein S6 kinase, 90W, polypeptide 5 (RPS6KA5), mRNA |
| NM_002228 | Homo sapiens v-jun sarcoma virus 17 oncogene homolog (avian) (JUN), mRNA |

[0361] TABLE II

MAP kinase siNA and Target Sequences

| | | | | | | | | |
|---|---|---|---|---|---|---|---|---|
| | | Seq | | | Seq | | | Seq |
| Pos | Target Sequence | ID | UPos | Upper seq | ID | LPos | Lower seq | ID |

NM_002745 (MAPK1/ERK2)

| | | | | | | | | |
|---|---|---|---|---|---|---|---|---|
| 3 | CCCUCCCUCCGCCCGCCCG | 1 | 3 | CCCUCCCUGCGCCCGCCCG | 1 | 21 | CGGGCGGGCGGAGGGAGGG | 164 |
| 21 | GCCGGCCCGCCCGUCAGUC | 2 | 21 | GCCGGCCCGCCCGUCAGUC | 2 | 39 | GACUGACGGGCGGGCCGGC | 165 |
| 39 | CUGGCAGGCAGGCAGGCAA | 3 | 39 | CUGGCAGGCAGGCAGGCAA | 3 | 57 | UUGCCUGCCUGCCUGCCAG | 166 |
| 57 | AUCGGUCCGAGUGGCUGUC | 4 | 57 | AUCGGUCCGAGUGGCUGUC | 4 | 75 | GACAGCCACUCGGACCGAU | 167 |
| 75 | CGGCUCUUGAGCUCUCCCG | 5 | 75 | CGGCUCUUCAGCUCUCCCG | 5 | 93 | CGGGAGAGCUGAAGAGCCG | 168 |
| 93 | GCUCGGCGUCUUCCUUCCU | 6 | 93 | GCUCGGCGUCUUCCUUCCU | 6 | 111 | AGGAAGGAAGACGCCGAGC | 169 |
| 111 | UCCUCCCGGUCAGCGUGGG | 7 | 111 | UCCUCCCGGUCAGCGUCGG | 7 | 129 | CCGACGCUGACCGGGAGGA | 170 |
| 129 | GCGGCUGCACCGGCGGCGG | 8 | 129 | GCGGCUGCACCGGCGGCGG | 8 | 147 | CCGCCGCGGGUGCAGCCGC | 171 |
| 147 | GCGCAGUCCCUGCGGGAGG | 9 | 147 | GCGCAGUCCCUGCGGGAGG | 9 | 165 | CCUCCCGCAGGGACUGCGC | 172 |
| 165 | GGGCGACAAGAGCUGAGCG | 10 | 165 | GGGCGACAAGAGCUGAGCG | 10 | 183 | CGCUCAGCUCUUGUCGCCC | 173 |
| 183 | GGCGGCCGCCGAGCGUCGA | 11 | 183 | GGCGGGCGCCGAGCGUCGA | 11 | 201 | UCGACGCUCGGCGGCCGCC | 174 |
| 201 | AGCUCAGCGCGGCGGAGGC | 12 | 201 | AGCUCAGCGCGGCGGAGGC | 12 | 219 | GCCUCCGCCGCGCUGAGCU | 175 |
| 219 | CGGCGGCGGCCCGGCAGCC | 13 | 219 | CGGCGGCGGCCCGGCAGCC | 13 | 237 | GGCUGCCGGGCCGCCGCCG | 176 |
| 237 | CAACAUGGCGGCGGCGGCG | 14 | 237 | CAACAUGGCGGCGGCGGCG | 14 | 255 | CGCCGCCGCCGCCAUGUUG | 177 |
| 255 | GGCGGCGGGCGCGGGCCCG | 15 | 255 | GGCGGCGGGCGCGGGCCCG | 15 | 273 | CGGGCCCGCGCCCGCCGCC | 178 |
| 273 | GGAGAUGGUCCGCGGGCAG | 16 | 273 | GGAGAUGGUCCGCGGGCAG | 16 | 291 | CUGCCCGCGGACCAUCUCC | 179 |
| 291 | GGUGUUCGAGGUGGGGCCG | 17 | 291 | GGUGUUCGACGUGGGGCCG | 17 | 309 | CGGCCCCACGUCGAACACC | 180 |
| 309 | GCGCUACACCAACCUCUCG | 18 | 309 | GCGCUACACCAACCUCUCG | 18 | 327 | CGAGAGGUUGGUGUAGCGC | 181 |
| 327 | GUACAUCGGCGAGGGCGCC | 19 | 327 | GUACAUCGGCGAGGGCGCC | 19 | 345 | GGCGCCCUCGCCGAUGUAC | 182 |
| 345 | CUACGGCAUGGUGUGCUCU | 20 | 345 | CUACGGCAUGGUGUGCUCU | 20 | 363 | AGAGCACACCAUGCCGUAG | 183 |
| 363 | UGCUUAUGAUAAUGUCAAC | 21 | 363 | UGCUUAUGAUAAUGUCAAC | 21 | 381 | GUUGACAUUAUCAUAAGCA | 184 |
| 381 | CAAAGUUCGAGUAGCUAUC | 22 | 381 | CAAAGUUCGAGUAGCUAUC | 22 | 399 | GAUAGCUACUCGAACUUUG | 185 |
| 399 | CAAGAAAAUCAGGCCCUUU | 23 | 399 | CAAGAAAAUCAGCCCCUUU | 23 | 417 | AAAGGGGCUGAUUUUCUUG | 186 |
| 417 | UGAGCACCAGACCUACUGC | 24 | 417 | UGAGCACCAGACCUACUGC | 24 | 435 | GCAGUAGGUCUGGUGCUCA | 187 |
| 435 | CCAGAGAACCCUGAGGGAG | 25 | 435 | CCAGAGAACCCUGAGGGAG | 25 | 453 | CUCCCUCAGGGUUCUCUGG | 188 |
| 453 | GAUAAAAAUCUUACUGCGC | 26 | 453 | GAUAAAAAUGUUACUGCGC | 26 | 471 | GCGCAGUAAGAUUUUUAUC | 189 |
| 471 | CUUCAGACAUGAGAACAUC | 27 | 471 | CUUCAGACAUGAGAACAUC | 27 | 489 | GAUGUUCUCAUGUCUGAAG | 190 |
| 489 | CAUUGGAAUCAAUGACAUU | 28 | 489 | CAUUGGAAUCAAUGACAUU | 28 | 507 | AAUGUCAUUGAUUCCAAUG | 191 |
| 507 | UAUUCGAGCACCAACCAUC | 29 | 507 | UAUUCGAGCACCAACCAUC | 29 | 525 | GAUGGUUGGUGCUCGAAUA | 192 |
| 525 | CGAGCAAAUGAAAGAUGUA | 30 | 525 | CGAGCAAAUGAAAGAUGUA | 30 | 543 | UACAUCUUUCAUUUGCUCG | 193 |
| 543 | AUAUAUAGUACAGGACCUC | 31 | 543 | AUAUAUAGUACAGGACCUC | 31 | 561 | GAGGUCCUGUACUAUAUAU | 194 |
| 561 | CAUGGAAACAGAUCUUUAC | 32 | 561 | CAUGGAAACAGAUCUUUAC | 32 | 579 | GUAAAGAUCUGUUUCCAUG | 195 |
| 579 | CAAGCUCUUGAAGACACAA | 33 | 579 | CAAGCUCUUGAAGACACAA | 33 | 597 | UUGUGUCUUCAAGAGCUUG | 196 |
| 597 | ACACCUCAGCAAUGACCAU | 34 | 597 | ACAGCUCAGCAAUGACCAU | 34 | 615 | AUGGUCAUUGCUGAGGUGU | 197 |
| 615 | UAUCUGCUAUUUUCUCUAC | 35 | 615 | UAUCUGCUAUUUUCUCUAC | 35 | 633 | GUAGAGAAAAUAGCAGAUA | 198 |
| 633 | CCAGAUCCUCAGAGGGUUA | 36 | 633 | CCAGAUCCUCAGAGGGUUA | 36 | 651 | UAACCGUCUGAGGAUCUGG | 199 |
| 651 | AAAAUAUAUCCAUUCAGCU | 37 | 651 | AAAAUAUAUCCAUUCAGCU | 37 | 669 | AGCUGAAUGGAUAUAUUUU | 200 |
| 669 | UAACGUUCUGCACCGUGAC | 38 | 669 | UAACGUUCUGCACCGUGAC | 38 | 687 | GUCACGGUGGAGAACGUUA | 201 |
| 687 | CCUCAAGCCUUCGAACCUG | 39 | 687 | CCUCAAGCCUUCCAACCUG | 39 | 705 | CAGGUUGGAAGGCUUGAGG | 202 |
| 705 | GCUGCUCAACACCACCUGU | 40 | 705 | GCUGCUCAACACCACCUGU | 40 | 723 | ACAGGUGGUGUUGAGCAGC | 203 |
| 723 | UGAUCUCAAGAUCUGUGAC | 41 | 723 | UGAUCUCAAGAUCUGUGAC | 41 | 741 | GUCACAGAUCUUGAGAUCA | 204 |
| 741 | CUUUGGCCUGGCCCGUGUU | 42 | 741 | CUUUGGCCUGGCCCGUGUU | 42 | 759 | AACACGGGCCAGGCCAAAG | 205 |
| 759 | UGCAGAUCCAGACCAUGAU | 43 | 759 | UGCAGAUCCAGACCAUGAU | 43 | 777 | AUCAUGGUCUGGAUCUGCA | 206 |
| 777 | UCAGACAGGGUUCCUGACA | 44 | 777 | UCAGACAGGGUUCCUGACA | 44 | 795 | UGUCAGGAACCCUGUGUGA | 207 |
| 795 | AGAAUAUGUGGCCACACGU | 45 | 795 | AGAAUAUGUGGCCACACGU | 45 | 813 | ACGUGUGGCCAGAUAUUCU | 208 |
| 813 | UUGGUACAGGGCUCCAGAA | 46 | 813 | UUGGUACAGGGCUCCAGAA | 46 | 831 | UUCUGGAGCCCUGUACCAA | 209 |
| 831 | AAUUAUGUUGAAUUCCAAG | 47 | 831 | AAUUAUGUUGAAUUCCAAG | 47 | 849 | CUUGGAAUUCAACAUAAUU | 210 |
| 849 | GGGCUACACCAAGUCCAUU | 48 | 849 | GGGCUACACCAAGUCCAUU | 48 | 867 | AAUGGACUUGGUGUAGCCC | 211 |
| 867 | UGAUAUUUGGUCUGUAGGC | 49 | 867 | UGAUAUUUGGUCUGUAGGC | 49 | 885 | GCCUACAGACCAAAUAUCA | 212 |
| 885 | CUGCAUUCUGGCAGAAAUG | 50 | 885 | CUGCAUUCUGGCAGAAAUG | 50 | 903 | CAUUUCUGCCAGAAUGCAG | 213 |
| 903 | GCUUUCUAACAGGCCCAUC | 51 | 903 | GCUUUCUAACAGGCCCAUC | 51 | 921 | GAUGGGGCUGUUAGAAAGC | 214 |
| 921 | CUUUCCAGGGAAGCAUUAU | 52 | 921 | CUUUCCAGGGAAGCAUUAU | 52 | 939 | AUAAUGCUUCCCUGGAAAG | 215 |
| 939 | UCUUGACCAGCUGAAACAC | 53 | 939 | UCUUGACCAGCUGAAACAC | 53 | 957 | GUGUUUCAGCUGGUCAAGA | 216 |
| 957 | CAUUUUGGGUAUUCUUGGA | 54 | 957 | CAUUUUGGGUAUUCUUGGA | 54 | 975 | UCCAAGAAUAGCCAAAAUG | 217 |
| 975 | AUCCCCAUCACAAGAAGAC | 55 | 975 | AUCCCCAUCACAAGAAGAC | 55 | 993 | GUCUUCUUGUGAUGGGGAU | 218 |
| 993 | CCUGAAUUGUAUAAUAAAU | 56 | 993 | CCUGAAUUGUAUAAUAAAU | 56 | 1011 | AUUUAUUAUACAAUUCAGG | 219 |
| 1011 | UUUAAAAGCUAGGAACUAU | 57 | 1011 | UUUAAAAGCUAGGAACUAU | 57 | 1029 | AUAGUUCCUAGCUUUUAAA | 220 |
| 1029 | UUUGCUUUCUCUUCCACAC | 58 | 1029 | UUUGCUUUCUCUUCCACAC | 58 | 1047 | GUGUGGAAGAGAAAGCAAA | 221 |
| 1047 | CAAAAAUAAGGUGCCAUGG | 59 | 1047 | CAAAAAUAAGGUGCCAUGG | 59 | 1065 | CCAUGGCACCUUAUUUUUG | 222 |
| 1065 | GAACAGGCUGUUCCCAAAU | 60 | 1065 | GAACAGGCUGUUCCCAAAU | 60 | 1083 | AUUUGGGAACAGCCUGUUC | 223 |
| 1083 | UGCUGACUCCAAAGCUCUG | 61 | 1083 | UGCUGACUCCAAAGCUCUG | 61 | 1101 | CAGAGCUUUGGAGUCAGCA | 224 |
| 1101 | GGACUUAUUGGACAAAAUG | 62 | 1101 | GGACUUAUUGGACAAAAUG | 62 | 1119 | CAUUUUGUCCAAUAAGUCC | 225 |
| 1119 | GUUGAGAUUCAACCCACAC | 63 | 1119 | GUUGACAUUCAACCCACAC | 63 | 1137 | GUGUGGGUUGAAUGUCAAC | 226 |
| 1137 | CAAGAGGAUUGAAGUAGAA | 64 | 1137 | CAAGAGGAUUGAAGUAGAA | 64 | 1155 | UUCUACUUCAAUCCUCUUG | 227 |
| 1155 | ACAGGCUCUGGCCCACCCA | 65 | 1155 | ACAGGCUCUGGCCCACCCA | 65 | 1173 | UGGGUGGGCCAGAGCCUGU | 228 |
| 1173 | AUAUCUGGAGGAGUAUUAC | 66 | 1173 | AUAUCUGGAGCAGUAUUAC | 66 | 1191 | GUAAUACUGCUCCAGAUAU | 229 |
| 1191 | CGACCCGAGUGACGAGCCC | 67 | 1191 | CGACCCGAGUGACGAGCCC | 67 | 1209 | GGGCUCGUCACUCGGGUCG | 230 |
| 1209 | CAUCGCCGAAGCACCAUUC | 68 | 1209 | CAUCGCCGAAGCACCAUUC | 68 | 1227 | GAAUGGUGCUUCGGCGAUG | 231 |
| 1227 | CAAGUUCGACAUGGAAUUG | 69 | 1227 | CAAGUUCGACAUGGAAUUG | 69 | 1245 | CAAUUCCAUGUCGAACUUG | 232 |
| 1245 | GGAUGACUUGCCUAAGGAA | 70 | 1245 | GGAUGACUUGCCUAAGGAA | 70 | 1263 | UUCCUUAGGCAAGUCAUGC | 233 |
| 1263 | AAAGCUCAAAGAACUAAUU | 71 | 1263 | AAAGCUCAAAGAACUAAUU | 71 | 1281 | AAUUAGUUCUUUGAGCUUU | 234 |
| 1281 | UUUUGAAGAGACUGCUAGA | 72 | 1281 | UUUUGAAGAGACUGCUAGA | 72 | 1299 | UCUAGCAGUCUCUUCAAAA | 235 |
| 1299 | AUUCCAGCCAGGAUACAGA | 73 | 1299 | AUUCCAGCCAGGAUACAGA | 73 | 1317 | UGUGUAUCCUGGCUGGAAU | 236 |
| 1317 | AUCUUAAAUUUGUCAGGAC | 74 | 1317 | AUCUUAAAUUUGUCAGGAC | 74 | 1335 | GUCCUGACAAAUUUAAGAU | 237 |
| 1335 | CAAGGGCUCAGAGGACUGG | 75 | 1335 | CAAGGGCUCAGAGGACUGG | 75 | 1353 | CCAGUCCUCUGAGCCCUUG | 238 |
| 1353 | GACGUGCUCAGACAUCGGU | 76 | 1353 | GACGUGCUCAGACAUCGGU | 76 | 1371 | ACCGAUGUCUGAGCACGUC | 239 |
| 1371 | UGUUCUUCUUCCCAGUUCU | 77 | 1371 | UGUUCUUCUUCCGAGUUCU | 77 | 1389 | AGAACUGGGAAGAAGAACA | 240 |
| 1389 | UUGACCCCUGGUCCUGUCU | 78 | 1389 | UUGACCCCUGGUCCUGUCU | 78 | 1407 | AGACAGGACCAGGGGUCAA | 241 |
| 1407 | UCCAGCCCGUCUUGGCUUA | 79 | 1407 | UCCAGCCCGUCUUGGCUUA | 79 | 1425 | UAAGCCAAGACGGGCUGGA | 242 |
| 1425 | AUCCACUUUGACUCCUUUG | 80 | 1425 | AUCCACUUUGACUCCUUUG | 80 | 1443 | CAAAGGAGUCAAAGUGGAU | 243 |
| 1443 | GAGCCGUUUGGAGGGGCGG | 81 | 1443 | GAGCCGUUUGGAGGGGCGG | 81 | 1461 | CCGCCCCUCCAAACGGCUC | 244 |
| 1461 | GUUUCUGGUAGUUGUGGCU | 82 | 1461 | GUUUCUGGUAGUUGUGGCU | 82 | 1479 | AGCCACAACUACCAGAAAC | 245 |
| 1479 | UUUUAUGCUUUCAAAGAAU | 83 | 1479 | UUUUAUGCUUUCAAAGAAU | 83 | 1497 | AUUCUUUGAAAGCAUAAAA | 246 |
| 1497 | UUUCUUCAGUCCAGAGAAU | 84 | 1497 | UUUCUUCAGUCGAGAGAAU | 84 | 1515 | AUUCUCUGGACUGAAGAAA | 247 |
| 1515 | UUCCUCCUGGCAGCCCUGU | 85 | 1515 | UUCCUCCUGGCAGCCCUGU | 85 | 1533 | ACAGGGCUGCCAGGAGGAA | 248 |
| 1533 | UGUGUGUCACCCAUUGGUG | 86 | 1533 | UGUGUGUCACCCAUUGGUG | 86 | 1551 | CACCAAUGGGUGACACACA | 249 |
| 1551 | GACCUGCGGCAGUAUGUAC | 87 | 1551 | GACCUGCGGCAGUAUGUAC | 87 | 1569 | GUACAUACUGCCGCAGGUC | 250 |
| 1569 | CUUCAGUGCACCUUACUGC | 88 | 1569 | CUUCAGUGCACCUUACUGC | 88 | 1587 | GCAGUAAGGUGCACUGAAG | 251 |
| 1587 | CUUACUGUUGCUUUAGUCA | 89 | 1587 | CUUACUGUUGCUUUAGUCA | 89 | 1605 | UGACUAAAGCAACAGUAAG | 252 |
| 1605 | ACUAAUUGCUUUCUGGUUU | 90 | 1605 | ACUAAUUGCUUUCUGGUUU | 90 | 1623 | AAACCAGAAAGCAAUUAGU | 253 |
| 1623 | UGAAAGAUGCAGUGGUUCC | 91 | 1623 | UGAAAGAUGCAGUGGUUCC | 91 | 1641 | GGAACCACUGCAUCUUUCA | 254 |
| 1641 | CUCCCUCUCCUGAAUCCUU | 92 | 1641 | CUCCCUCUCCUGAAUCCUU | 92 | 1659 | AAGGAUUCAGGAGAGGGAG | 255 |
| 1659 | UUUCUACAUGAUGCCCUGC | 93 | 1659 | UUUCUACAUGAUGCCCUGC | 93 | 1677 | GCAGGGCAUCAUGUAGAAA | 256 |
| 1677 | CUGACCAUGCAGCCGCACC | 94 | 1677 | CUGACCAUGGAGCGGCACC | 94 | 1695 | GGUGCGGCUGCAUGGUCAG | 257 |
| 1695 | CAGAGAGAGAUUCUUCCCC | 95 | 1695 | CAGAGAGAGAUUCUUCCCC | 95 | 1713 | GGGGAAGAAUCUCUCUCUG | 258 |
| 1713 | CAAUUGGCUCUAGUCACUG | 96 | 1713 | CAAUUGGCUCUAGUCACUG | 96 | 1731 | CAGUGACUAGAGCCAAUUG | 259 |
| 1731 | GGCAUCUCACUUUAUGAUA | 97 | 1731 | GGCAUCUCACUUUAUGAUA | 97 | 1749 | UAUCAUAAAGUGAGAUGCC | 260 |
| 1749 | AGGGAAGGCUACUACCUAG | 98 | 1749 | AGGGAAGGCUACUACCUAG | 98 | 1767 | CUAGGUAGUAGCCUUCCCU | 261 |
| 1767 | GGGCACUUUAAGUCAGUGA | 99 | 1767 | GGGCACUUUAAGUCAGUGA | 99 | 1785 | UCACUGACUUAAAGUGCCC | 262 |
| 1785 | ACAGCCCCUUAUUUGCACU | 100 | 1785 | ACAGCCCCUUAUUUGCACU | 100 | 1803 | AGUGCAAAUAAGGGGCUGU | 263 |
| 1803 | UUCACCUUUUGACCAUAAC | 101 | 1803 | UUCACCUUUUGACCAUAAC | 101 | 1821 | GUUAUGGUCAAAAGGUGAA | 264 |
| 1821 | CUGUUUCCGCAGAGCAGGA | 102 | 1821 | CUGUUUCCCCAGAGCAGGA | 102 | 1839 | UCCUGCUCUGGGGAAACAG | 265 |
| 1839 | AGCUUGUGGAAAUACCUUG | 103 | 1839 | AGCUUGUGGAAAUACCUUG | 103 | 1857 | CAAGGUAUUUCCACAAGCU | 266 |
| 1857 | GGCUGAUGUUGCAGCCUGC | 104 | 1857 | GGCUGAUGUUGCAGCCUGC | 104 | 1875 | GCAGGCUGCAACAUCAGCC | 267 |
| 1875 | GAGCAAGUGCUUCCGUCUC | 105 | 1875 | CAGCAAGUGCUUCCGUCUC | 105 | 1893 | GAGACGGAAGCACUUGCUG | 268 |
| 1893 | CCGGAAUCCUUGGGGAGCA | 106 | 1893 | CCGGAAUCCUUGGGGAGCA | 106 | 1911 | UGCUCCCCAAGGAUUCCGG | 269 |
| 1911 | ACUUGUCCACGUCUUUUCU | 107 | 1911 | ACUUGUCCACGUCUUUUCU | 107 | 1929 | AGAAAAGACGUGGACAAGU | 270 |
| 1929 | UCAUAUCAUGGUAGUCACU | 108 | 1929 | UCAUAUCAUGGUAGUCACU | 108 | 1947 | AGUGACUACGAUGAUAUGA | 271 |
| 1947 | UAACAUAUAUAAGGUAUGU | 109 | 1947 | UAACAUAUAUAAGGUAUGU | 109 | 1965 | ACAUACCUUAUAUAUGUUA | 272 |
| 1965 | UGCUAUUGGCCCAGCUUUU | 110 | 1965 | UGCUAUUGGCCCAGCUUUU | 110 | 1983 | AAAAGCUGGGCCAAUAGCA | 273 |
| 1983 | UAGAAAAUGCAGUCAUUUU | 111 | 1983 | UAGAAAAUGCAGUCAUUUU | 111 | 2001 | AAAAUGACUGCAUUUUCUA | 274 |
| 2001 | UUCUAAAUAAAAAGGAAGU | 112 | 2001 | UUCUAAAUAAAAAGGAAGU | 112 | 2019 | ACUUCCUUUUUAUUUAGAA | 275 |
| 2019 | UACUGCACCCAGCAGUGUC | 113 | 2019 | UACUGCACCCAGCAGUGUC | 113 | 2037 | GACACUGCUGGGUGCAGUA | 276 |
| 2037 | CACUCUGUAGUUACUGUGG | 114 | 2037 | CACUCUGUAGUUACUGUGG | 114 | 2055 | CCACAGUAACUACAGAGUG | 277 |
| 2055 | GUCACUUGUACCAUAUAGA | 115 | 2055 | GUCACUUGUACCAUAUAGA | 115 | 2073 | UCUAUAUGGUACAAGUGAC | 278 |
| 2073 | AGGUGUAACACUUGUCAAG | 116 | 2073 | AGGUGUAACACUUGUCAAG | 116 | 2091 | CUUGACAAGUGUUACACCU | 279 |
| 2091 | GAAGCGUUAUGUGCAGUAC | 117 | 2091 | GAAGCGUUAUGUGCAGUAC | 117 | 2109 | GUACUGCACAUAACGCUUC | 280 |
| 2109 | CUUAAUGUUUGUAAGACUU | 118 | 2109 | CUUAAUGUUUGUAAGACUU | 118 | 2127 | AAGUCUUACAAACAUUAAG | 281 |
| 2127 | UACAAAAAAAGAUUUAAAG | 119 | 2127 | UACAAAAAAAGAUUUAAAG | 119 | 2145 | CUUUAAAUCUUUUUUUGUA | 282 |
| 2145 | GUGGCAGCUUCACUCGACA | 120 | 2145 | GUGGCAGCUUCACUCGACA | 120 | 2163 | UGUCGAGUGAAGCUGCCAC | 283 |
| 2163 | AUUUGGUGAGAGAAGUACA | 121 | 2163 | AUUUGGUGAGAGAAGUACA | 121 | 2181 | UGUACUUCUCUCACCAAAU | 284 |
| 2181 | AAAGGUUGCAGUGCUGAGC | 122 | 2181 | AAAGGUUGCAGUGCUGAGC | 122 | 2199 | GCUCAGCACUGCAACCUUU | 285 |
| 2199 | CUGUGGGCGGUUUCUGGGG | 123 | 2199 | CUGUGGGCGGUUUCUGGGG | 123 | 2217 | CCCCAGAAACCGCCCACAG | 286 |
| 2217 | GAUGUCCCAGGGUGGAACU | 124 | 2217 | GAUGUCCGAGGGUGGAACU | 124 | 2235 | AGUUCCACCCUGGGACAUC | 287 |
| 2235 | UCCACAUGCUGGUGCAUAU | 125 | 2235 | UCCACAUGCUGGUGCAUAU | 125 | 2253 | AUAUGCACCAGCAUGUGGA | 288 |
| 2253 | UACGCCCUUGAGCUACUUC | 126 | 2253 | UACGCCCUUGAGCUACUUC | 126 | 2271 | GAAGUAGCUCAAGGGCGUA | 289 |
| 2271 | CAAAUGUGGUUUAUACCUC | 127 | 2271 | CAAAUGUGGUUUAUACCUC | 127 | 2289 | GAGGUAUAAACCACAUUUG | 290 |
| 2289 | CGCAGAUACAAGAAUCUUU | 128 | 2289 | CGCAGAUACAAGAAUCUUU | 128 | 2307 | AAAGAUUCUUGUAUCUGCG | 291 |
| 2307 | UAUGAAUAUACAAUUCUUU | 129 | 2307 | UAUGAAUAUACAAUUCUUU | 129 | 2325 | AAAGAAUUGUAUAUUCAUA | 292 |
| 2325 | UUUCCUUCUACAGCUUAGC | 130 | 2325 | UUUCCUUCUACAGCUUAGG | 130 | 2343 | GCUAAGCUGUAGAAGGAAA | 293 |
| 2343 | CUCCGUCUUUUCAACCACG | 131 | 2343 | CUCCGUCUUUUCAACCACG | 131 | 2361 | CGUGGUUGAAAAGACGGAG | 294 |
| 2361 | GAAGAUUUAAAACCCGACC | 132 | 2361 | GAACAUUUAAAACCCGACC | 132 | 2379 | GGUCGGGUUUUAAAUGUUC | 295 |
| 2379 | CUACUAGCACUGUUCUGUC | 133 | 2379 | CUACUAGCACUGUUCUGUC | 133 | 2397 | GACAGAACAGUGCUAGUAG | 296 |
| 2397 | CCUCAAGUACUCAAAUAUU | 134 | 2397 | CCUCAAGUACUCAAAUAUU | 134 | 2415 | AAUAUUUGAGUACUUGAGG | 297 |
| 2415 | UUCUGAUACUGCUGAGUCA | 135 | 2415 | UUCUGAUACUGCUGAGUCA | 135 | 2433 | UGACUCAGCAGUAUCAGAA | 298 |
| 2433 | AGACUGUCAGAAAAAGCUA | 136 | 2433 | AGACUGUCAGAAAAAGCUA | 136 | 2451 | UAGCUUUUUCUGACAGUCU | 299 |
| 2451 | AGCACUAAGUCGUGUUUGG | 137 | 2451 | AGCACUAACUCGUGUUUGG | 137 | 2469 | CCAAACACGAGUUAGUGCU | 300 |
| 2469 | GAGCUCUAUCCAUAUUUUA | 138 | 2469 | GAGCUCUAUCCAUAUUUUA | 138 | 2487 | UAAAAUAUGGAUAGAGCUC | 301 |
| 2487 | ACUGAUCUCUUUAAGUAUU | 139 | 2487 | ACUGAUCUCUUUAAGUAUU | 139 | 2505 | AAUACUUAAAGAGAUCAGU | 302 |
| 2505 | UUGUUCCUGCCACUGUGUA | 140 | 2505 | UUGUUCCUGCCACUGUGUA | 140 | 2523 | UACACAGUGGCAGGAACAA | 303 |
| 2523 | ACUGUGGAGUUGACUCGGU | 141 | 2523 | ACUGUGGAGUUGACUCGGU | 141 | 2541 | ACCGAGUCAACUGCACAGU | 304 |
| 2541 | UGUUCUGUCCCAGUGCGGU | 142 | 2541 | UGUUCUGUCCCAGUGCGGU | 142 | 2559 | ACCGCACUGGGACAGAACA | 305 |
| 2559 | UGCCUCCUCUUGACUUCCC | 143 | 2559 | UGCCUCCUCUUGACUUCCC | 143 | 2577 | GGGAAGUCAAGAGGAGGCA | 306 |
| 2577 | CCACUGCUCUCUGUGGUGA | 144 | 2577 | CCACUGCUCUCUGUGGUGA | 144 | 2595 | UCACCACAGAGAGCAGUGG | 307 |
| 2595 | AGAAAUUUGCCUUGUUCAA | 145 | 2595 | AGAAAUUUGCCUUGUUCAA | 145 | 2613 | UUGAACAAGGCAAAUUUCU | 308 |
| 2613 | AUAAUUACUGUACCCUCGC | 146 | 2613 | AUAAUUACUGUACCCUCGC | 146 | 2631 | GCGAGGGUACAGUAAUUAU | 309 |
| 2631 | CAUGACUGUUACAGCUUUC | 147 | 2631 | CAUGACUGUUACAGCUUUC | 147 | 2649 | GAAAGCUGUAACAGUCAUG | 310 |
| 2649 | CUGUGCAGAGAUGACUGUC | 148 | 2649 | CUGUGCAGAGAUGACUGUC | 148 | 2667 | GACAGUCAUCUCUGCACAG | 311 |
| 2667 | CCAAGUGCCACAUGCCUAC | 149 | 2667 | CCAAGUGCCACAUGCCUAC | 149 | 2685 | GUAGGCAUGUGGCACUUGG | 312 |
| 2685 | CGAUUGAAAUGAAAACUCU | 150 | 2685 | CGAUUGAAAUGAAAACUCU | 150 | 2703 | AGAGUUUUCAUUUCAAUCG | 313 |
| 2703 | UAUUGUUACCUCUGAGUUG | 151 | 2703 | UAUUGUUACCUCUGAGUUG | 151 | 2721 | CAACUCAGAGGUAACAAUA | 314 |
| 2721 | GUGUUCCACGGAAAAUGCU | 152 | 2721 | GUGUUCCACGGAAAAUGCU | 152 | 2739 | AGCAUUUUCCGUGGAACAC | 315 |
| 2739 | UAUCCAGCAGAUCAUUUAG | 153 | 2739 | UAUCCAGCAGAUCAUUUAG | 153 | 2757 | CUAAAUGAUCUGCUGGAUA | 316 |
| 2757 | GGAAAAAUAAUUCUAUUUU | 154 | 2757 | GGAAAAAUAAUUCUAUUUU | 154 | 2775 | AAAAUAGAAUUAUUUUUCC | 317 |
| 2775 | UUAGCUUUUCAUUUCUCAG | 155 | 2775 | UUAGCUUUUCAUUUCUCAG | 155 | 2793 | CUGAGAAAUGAAAAGCUAA | 318 |
| 2793 | GCUGUCCUUUUUUCUUGUU | 156 | 2793 | GCUGUCCUUUUUUCUUGUU | 156 | 2811 | AACAAGAAAAAAGGACAGC | 319 |
| 2811 | UUGAUUUUUGACAGCAAUG | 157 | 2811 | UUGAUUUUUGACAGCAAUG | 157 | 2829 | CAUUGCUGUCAAAAAUCAA | 320 |
| 2829 | GGAGAAUGGGUUAUAUAAA | 158 | 2829 | GGAGAAUGGGUUAUAUAAA | 158 | 2847 | UUUAUAUAACCCAUUCUCC | 321 |
| 2847 | AGACUGCCUGCUAAUAUGA | 159 | 2847 | AGACUGCCUGCUAAUAUGA | 159 | 2865 | UCAUAUUAGCAGGCAGUCU | 322 |
| 2865 | AACAGAAAUGCAUUUGUAA | 160 | 2865 | AACAGAAAUGCAUUUGUAA | 160 | 2883 | UUACAAAUGCAUUUCUGUU | 323 |
| 2883 | AUUCAUGAAAAUAAAUGUA | 161 | 2883 | AUUCAUGAAAAUAAAUGUA | 161 | 2901 | UACAUUUAUUUUCAUGAAU | 324 |
| 2901 | ACAUCUUCUAUCUUCAAAA | 162 | 2901 | ACAUCUUCUAUCUUCAAAA | 162 | 2919 | UUUUGAAGAUAGAAGAUGU | 325 |
| 2913 | UUCAAAAAAAAAAAAAAAA | 163 | 2913 | UUCAAAAAAAAAAAAAAAA | 163 | 2931 | UUUUUUUUUUUUUUUUGAA | 326 |

XM_055766.6 (MAPK3/ERK1)

| | | | | | | | | |
|---|---|---|---|---|---|---|---|---|
| 3 | CGGGGCCUCGGGCGGGGCC | 327 | 3 | CGGGGCCUCGGGCGGGGCC | 327 | 21 | GGCGCCGCCCGAGGCCCCG | 432 |
| 21 | CGCCGUGGGGAGGAGGGCG | 328 | 21 | CGCCGUGGGGAGGAGGGCG | 328 | 39 | CGCCCUCCUCCCCACGGCG | 433 |
| 39 | GGUGGGAGGGGAGGAGUGG | 329 | 39 | GGUGGGAGGGGAGGAGUGG | 329 | 57 | CCACUCCUCCCCUCCCACC | 434 |
| 57 | GAGAUGGCGGCGGCGGCGG | 330 | 57 | GAGAUGGCGGCGGCGGCGG | 330 | 75 | CCGCCGCCGCCGCCAUCUC | 435 |
| 75 | GCUCAGGGGGGCGGGGGCG | 331 | 75 | GCUCAGGGGGGCGGGGGCG | 331 | 93 | CGCCCCCGCCCCCCUGAGC | 436 |
| 93 | GGGGAGCCCCGUAGAACCG | 332 | 93 | GGGGAGCCCCGUAGAACCG | 332 | 111 | CGGUUCUACGGGGCUCCCC | 437 |
| 111 | GAGGGGGUCGGCCCGGGGG | 333 | 111 | GAGGGGGUCGGCCCGGGGG | 333 | 129 | CCCCCGGGCCGACCCCCUC | 438 |
| 129 | GUCCCGGGGGAGGUGGAGA | 334 | 129 | GUCCCGGGGGAGGUGGAGA | 334 | 147 | UCUCCACCUCCCCCGGGAC | 439 |
| 147 | AUGGUGAAGGGGCAGCCGU | 335 | 147 | AUGGUGAAGGGGCAGCCGU | 335 | 165 | ACGGCUGCCCCUUCACCAU | 440 |
| 165 | UUCGACGUGGGCCCGCGCU | 336 | 165 | UUCGACGUGGGCCCGCGCU | 336 | 183 | AGCGCGGGCCCACGUCGAA | 441 |
| 183 | UACACGCAGUUGCAGUACA | 337 | 183 | UACACGCAGUUGCAGUACA | 337 | 201 | UGUACUGCAACUGCGUGUA | 442 |
| 201 | AUCGGCGAGGGCGCGUACG | 338 | 201 | AUCGGCGAGGGCGCGUACG | 338 | 219 | CGUACGCGCCCUCGCCGAU | 443 |
| 219 | GGCAUGGUCAGCUCGGCCU | 339 | 219 | GGGAUGGUGAGCUCGGCGU | 339 | 237 | AGGCCGAGCUGACCAUGCC | 444 |
| 237 | UAUGACCACGUGCGCAAGA | 340 | 237 | UAUGACCACGUGCGCAAGA | 340 | 255 | UCUUGCGGACGUGGUCAUA | 445 |
| 255 | ACUCGCGUGGCCAUCAAGA | 341 | 255 | ACUCGCGUGGCCAUCAAGA | 341 | 273 | UCUUGAUGGCCACGCGAGU | 446 |
| 273 | AAGAUGAGCCCCUUCGAAC | 342 | 273 | AAGAUCAGCCCCUUCGAAC | 342 | 291 | GUUCGAAGGGGCUGAUCUU | 447 |
| 291 | CAUCAGACCUACUGCCAGC | 343 | 291 | CAUCAGACCUACUGCGAGC | 343 | 309 | GCUGGCAGUAGGUCUGAUG | 448 |
| 309 | CGCACGCUCCGGGAGAUCC | 344 | 309 | CGCACGCUCCGGGAGAUCC | 344 | 327 | GGAUCUCCCGGAGCGUGCG | 449 |
| 327 | CAGAUCCUGCUGCGCUUCC | 345 | 327 | CAGAUCCUGCUGCGCUUCC | 345 | 345 | GGAAGCGCAGCAGGAUCUG | 450 |
| 345 | CGCCAUGAGAAUGUCAUCG | 346 | 345 | CGCCAUGAGAAUGUCAUcG | 346 | 363 | CGAUGACAUUCUCAUGGCG | 451 |
| 363 | GGCAUCCGAGACAUUCUGC | 347 | 363 | GGCAUCCGAGACAUUCUGC | 347 | 381 | GCAGAAUGUCUCGGAUGCC | 452 |
| 381 | CGGGCGUCCACCCUGGAAG | 348 | 381 | CGGGCGUCCACCCUGGAAG | 348 | 399 | CUUCCAGGGUGGACGCCCG | 453 |
| 399 | GCCAUGAGAGAUGUCUACA | 349 | 399 | GCCAUGAGAGAUGUCUACA | 349 | 417 | UGUAGACAUCUCUCAUGGC | 454 |
| 417 | AUUGUGCAGGACCUGAUGG | 350 | 417 | AUUGUGCAGGACCUGAUGG | 350 | 435 | CCAUCAGGUCCUGCACAAU | 455 |
| 435 | GAGACUGACCUGUACAAGU | 351 | 435 | GAGACUGACCUGUACAAGU | 351 | 453 | ACUUGUACAGGUCAGUCUC | 456 |
| 453 | UUGCUGAAAAGCCAGCAGC | 352 | 453 | UUGCUGAAAAGCCAGCAGC | 352 | 471 | GCUGCUGGCUUUUCAGCAA | 457 |
| 471 | CUGAGCAAUGACCAUAUCU | 353 | 471 | CUGAGCAAUGACCAUAUCU | 353 | 489 | AGAUAUGGUCAUUGCUCAG | 458 |
| 489 | UGCUACUUCCUCUACCAGA | 354 | 489 | UGCUACUUCCUCUACCAGA | 354 | 507 | UCUGGUAGAGGAAGUAGCA | 459 |
| 507 | AUCCUGCGGGGCCUCAAGU | 355 | 507 | AUCCUGCGGGGCCUCAAGU | 355 | 525 | ACUUGAGGCCCCGCAGGAU | 460 |
| 525 | UACAUCCACUCCGCCAACG | 356 | 525 | UACAUCCACUCCGCCAACG | 356 | 543 | CGUUGGCGGAGUGGAUGUA | 461 |
| 543 | GUGCUCCACCGAGAUCUAA | 357 | 543 | GUGCUCCACCGAGAUCUAA | 357 | 561 | UUAGAUCUCGGUGGAGCAC | 462 |
| 561 | AAGCCCUCCAACCUGCUCA | 358 | 561 | AAGCCCUCCAACCUGCUCA | 358 | 579 | UGAGCAGGUUGGAGGGCUU | 463 |
| 579 | AUCAACACCACCUGCGACC | 359 | 579 | AUCAACACCACCUGCGACC | 359 | 597 | GGUCGCAGGUGGUGUUGAU | 464 |
| 597 | CUUAAGAUUUGUGAUUUCG | 360 | 597 | CUUAAGAUUUGUGAUUUCG | 360 | 615 | CGAAAUCACAAAUCUUAAG | 465 |
| 615 | GGCCUGGCCCGGAUUGCCG | 361 | 615 | GGCCUGGCCCGGAUUGCCG | 361 | 633 | CGGCAAUCCGGGCCAGGCC | 466 |
| 633 | GAUCCUGAGGAUGACCACA | 362 | 633 | GAUCCUGAGGAUGACCACA | 362 | 651 | UGUGGUCAUGCUCAGGAUC | 467 |
| 651 | ACCGGCUUCCUGACGGAGU | 363 | 651 | ACCGGCUUCCUGACGGAGU | 363 | 669 | ACUCCGUCAGGAAGCCGGU | 468 |
| 669 | UAUGUGGCUACGCGCUGGU | 364 | 669 | UAUGUGGCUACGCGCUGGU | 364 | 687 | ACCAGCGCGUAGCCACAUA | 469 |
| 687 | UACCGGGCCCCAGAGAUCA | 365 | 687 | UACCGGGCCCCAGAGAUCA | 365 | 705 | UGAUCUCUGGGGCCCGGUA | 470 |
| 705 | AUGCUGAACUCCAAGGGCU | 366 | 705 | AUGCUGAACUCCAAGGGCU | 366 | 723 | AGCCCUUGGAGUUCAGCAU | 471 |
| 723 | UAUACCAAGUCCAUCGACA | 367 | 723 | UAUACCAAGUCCAUCGACA | 367 | 741 | UGUCGAUGGACUUGGUAUA | 472 |
| 741 | AUCUGGUCUGUGGGCUGCA | 368 | 741 | AUCUGGUCUGUGGGCUGCA | 368 | 759 | UGCAGCCCACAGACCAGAU | 473 |
| 759 | AUUCUGGCUGAGAUGCUCU | 369 | 759 | AUUCUGGCUGAGAUGCUCU | 369 | 777 | AGAGCAUCUCAGCCAGAAU | 474 |
| 777 | UCUAACCGGCCCAUCUUCC | 370 | 777 | UCUAACCGGCCCAUCUUCC | 370 | 795 | GGAAGAUGGGCCGGUUAGA | 475 |
| 795 | CCUGGCAAGCACUACCUGG | 371 | 795 | CCUGGCAAGCACUACCUGG | 371 | 813 | CCAGGUAGUGCUUGCCAGG | 476 |
| 813 | GAUCAGCUCAACCACAUUC | 372 | 813 | GAUCAGCUCAACCACAUUC | 372 | 831 | GAAUGUGGUUGAGCUGAUC | 477 |
| 831 | CUGGGCAUCCUGGGCUCCC | 373 | 831 | CUGGGCAUCCUGGGCUCCC | 373 | 849 | GGGAGCCCAGGAUGCCCAG | 478 |
| 849 | CCAUCCCAGGAGGACCUGA | 374 | 849 | CCAUCCCAGGAGGACCUGA | 374 | 867 | UCAGGUCCUCCUGGGAUGG | 479 |
| 867 | AAUUGUAUCAUCAACAUGA | 375 | 867 | AAUUGUAUCAUCAACAUGA | 375 | 885 | UCAUGUUGAUGAUACAAUU | 480 |
| 885 | AAGGCCCGAAACUACCUAC | 376 | 885 | AAGGCCCGAAACUACCUAC | 376 | 903 | GUAGGUAGUUUCGGGCCUU | 481 |
| 903 | CAGUCUCUGCCCUCCAAGA | 377 | 903 | CAGUCUCUGCCCUCCAAGA | 377 | 921 | UCUUGGAGGGCAGAGACUG | 482 |
| 921 | ACCAAGGUGGCUUGGGCCA | 378 | 921 | ACCAAGGUGGCUUGGGCCA | 378 | 939 | UGGCCCAAGCCACCUUGGU | 483 |
| 939 | AAGCUUUUCCCCAAGUCAG | 379 | 939 | AAGCUUUUCCCCAAGUCAG | 379 | 957 | CUGACUUGGGGAAAAGCUU | 484 |
| 957 | GACUCCAAAGCCCUUGACC | 380 | 957 | GACUCCAAAGCCCUUGACC | 380 | 975 | GGUCAAGGGCUUUGGAGUC | 485 |
| 975 | CUGCUGGACCGGAUGUUAA | 381 | 975 | CUGCUGGACCGGAUGUUAA | 381 | 993 | UUAACAUCCGGUCCAGCAG | 486 |
| 993 | ACCUUUAACCCCAAUAAAC | 382 | 993 | ACCUUUAACCCCAAUAAAC | 382 | 1011 | GUUUAUUGGGGUUAAAGGU | 487 |
| 1011 | CGGAUCACAGUGGAGGAAG | 383 | 1011 | CGGAUCACAGUGGAGGAAG | 383 | 1029 | CUUCCUCCACUGUGAUCCG | 488 |
| 1029 | GCGCUGGCUCACCCCUACC | 384 | 1029 | GCGCUGGCUCACCCCUACC | 384 | 1047 | GGUAGGGGUGAGCCAGCGC | 489 |
| 1047 | CUGGAGCAGUACUAUGACC | 385 | 1047 | CUGGAGCAGUACUAUGACC | 385 | 1065 | GGUCAUAGUACUGCUCCAG | 490 |
| 1065 | CCGACGGAUGAGCCAGUGG | 386 | 1065 | CCGACGGAUGAGCCAGUGG | 386 | 1083 | CCACUGGCUCAUCCGUCGG | 491 |
| 1083 | GCCGAGGAGCCCUUCACCU | 387 | 1083 | GCCGAGGAGCCCUUCACCU | 387 | 1101 | AGGUGAAGGGCUCCUCGGC | 492 |
| 1101 | UUCGCCAUGGAGCUGGAUG | 388 | 1101 | UUCGCCAUGGAGCUGGAUG | 388 | 1119 | CAUCCAGCUCCAUGGCGAA | 493 |
| 1119 | GACCUACCUAAGGAGCGGC | 389 | 1119 | GACCUACCUAAGGAGCGGC | 389 | 1137 | GCCGCUCCUUAGGUAGGUC | 494 |
| 1137 | CUGAAGGAGCUCAUCUUCC | 390 | 1137 | CUGAAGGAGCUCAUCUUCC | 390 | 1155 | GGAAGAUGAGCUCCUUCAG | 495 |
| 1155 | CAGGAGACAGCACGCUUCC | 391 | 1155 | CAGGAGACAGCACGCUUCC | 391 | 1173 | GGAAGCGUGCUGUCUCCUG | 496 |
| 1173 | CAGCCCGGAGUGCUGGAGG | 392 | 1173 | CAGCCCGGAGUGCUGGAGG | 392 | 1191 | CCUCCAGCACUCCGGGCUG | 497 |
| 1191 | GCCCCCUAGCCCAGACAGA | 393 | 1191 | GCCCCCUAGCCCAGACAGA | 393 | 1209 | UCUGUCUGGGCUAGGGGGC | 498 |
| 1209 | ACAUCUCUGCACCCUGGGG | 394 | 1209 | ACAUCUCUGCACCCUGGGG | 394 | 1227 | CCCCAGGGUGCAGAGAUGU | 499 |
| 1227 | GCCUGGAACAGAACUGGCA | 395 | 1227 | GCCUGGAACAGAACUGGCA | 395 | 1245 | UGCCAGUUCUGUUCCAGGC | 500 |
| 1245 | AAAGAGGCAAGAGGUCACU | 396 | 1245 | AAAGAGGCAAGAGGUCACU | 396 | 1263 | AGUGACCUCUUGCCUCUUU | 501 |
| 1263 | UGAGGGCCUCUGUCACCCA | 397 | 1263 | UGAGGGCCUCUGUCACCCA | 397 | 1281 | UGGGUGACAGAGGCCCUCA | 502 |
| 1281 | AGGACCUGCCUCCUGCCUG | 398 | 1281 | AGGACCUGCCUCCUGCCUG | 398 | 1299 | CAGGCAGGAGGCAGGUCCU | 503 |
| 1299 | GCCCCUCUCCCGCCAGACU | 399 | 1299 | GCCCCUCUCCCGCCAGACU | 399 | 1317 | AGUCUGGCGGGAGAGGGGC | 504 |
| 1317 | UGUUAGAAAAUGGACACUG | 400 | 1317 | UGUUAGAAAAUGGACACUG | 400 | 1335 | CAGUGUCCAUUUUCUAACA | 505 |
| 1335 | GUGCCCAGCCCGGACCUUG | 401 | 1335 | GUGCCCAGCCCGGACCUUG | 401 | 1353 | CAAGGUCCGGGCUGGGCAC | 506 |
| 1353 | GGCAGCCCAGGCCGGGGUG | 402 | 1353 | GGCAGCCCAGGCCGGGGUG | 402 | 1371 | CACCCCGGCCUGGGCUGCC | 507 |
| 1371 | GGAGCAUGGGCCUGGCCAC | 403 | 1371 | GGAGCAUGGGCCUGGCCAC | 403 | 1389 | GUGGCCAGGCCCAUGCUCC | 508 |
| 1389 | CCUCUCUCCUUUGCUGAGG | 404 | 1389 | CCUCUCUCCUUUGCUGAGG | 404 | 1407 | CCUCAGCAAAGGAGAGAGG | 509 |
| 1407 | GCCUCCAGCUUCAGGCAGG | 405 | 1407 | GCCUCCAGCUUCAGGCAGG | 405 | 1425 | CCUGCCUGAAGCUGGAGGC | 510 |
| 1425 | GCCAAGGCCUUCUCCUCCC | 406 | 1425 | GCCAAGGCCUUCUCCUCCC | 406 | 1443 | GGGAGGAGAAGGCCUUGGC | 511 |
| 1443 | CCACCCGCCCUCCCCACGG | 407 | 1443 | CCACCCGCCCUCCCCACGG | 407 | 1461 | CCGUGGGGAGGGCGGGUGG | 512 |
| 1461 | GGGCCUCGGGACCUCAGGU | 408 | 1461 | GGGCCUCGGGACCUCAGGU | 408 | 1479 | ACCUGAGGUCCCGAGGCCC | 513 |
| 1479 | UGGCCCCAGUUCAAUCUCC | 409 | 1479 | UGGCCCCAGUUCAAUCUCC | 409 | 1497 | GGAGAUUGAACUGGGGCCA | 514 |
| 1497 | CCGCUGCUGCUGCUGCGCC | 410 | 1497 | CCGCUGCUGCUGCUGCGCC | 410 | 1515 | GGCGCAGCAGCAGCAGCGG | 515 |
| 1515 | CCUUACCUUCCCCAGCGUC | 411 | 1515 | CCUUACCUUCCCCAGCGUC | 411 | 1533 | GACGCUGGGGAAGGUAAGG | 516 |
| 1533 | CCCAGUCUCUGGCAGUUCU | 412 | 1533 | CCCAGUCUCUGGCAGUUCU | 412 | 1551 | AGAACUGCCAGAGACUGGG | 517 |
| 1551 | UGGAAUGGAAGGGUUCUGG | 413 | 1551 | UGGAAUGGAAGGGUUCUGG | 413 | 1569 | CCAGAACCCUUCCAUUCCA | 518 |
| 1569 | GCUGCCCCAACCUGCUGAA | 414 | 1569 | GCUGCCCCAACCUGCUGAA | 414 | 1587 | UUCAGCAGGUUGGGGCAGC | 519 |
| 1587 | AGGGCAGAGGUGGAGGGUG | 415 | 1587 | AGGGCAGAGGUGGAGGGUG | 415 | 1605 | CACCCUCCACCUCUGCCCU | 520 |
| 1605 | GGGGGGCGCUGAGUAGGGA | 416 | 1605 | GGGGGGCGCUGAGUAGGGA | 416 | 1623 | UCCCUACUCAGCGCCCCCC | 521 |
| 1623 | ACUCAGGGCCAUGCCUGCC | 417 | 1623 | ACUCAGGGCCAUGCCUGCC | 417 | 1641 | GGCAGGCAUGGCCCUGAGU | 522 |
| 1641 | CCCCCUCAUCUCAUUCAAA | 418 | 1641 | CCCCCUCAUCUCAUUCAAA | 418 | 1659 | UUUGAAUGAGAUGAGGGGG | 523 |
| 1659 | ACCCCACCCUAGUUUCCCU | 419 | 1659 | ACCCCACCCUAGUUUCCCU | 419 | 1677 | AGGGAAACUAGGGUGGGGU | 524 |
| 1677 | UGAAGGAACAUUCCUUAGU | 420 | 1677 | UGAAGGAACAUUCCUUAGU | 420 | 1695 | ACUAAGGAAUGUUCCUUCA | 525 |
| 1695 | UCUCAAGGGCUAGCAUCCC | 421 | 1695 | UCUCAAGGGCUAGCAUCCC | 421 | 1713 | GGGAUGCUAGCCCUUGAGA | 526 |
| 1713 | CUGAGGAGCCAGGCCGGGC | 422 | 1713 | CUGAGGAGCCAGGCCGGGC | 422 | 1731 | GCCCGGCCUGGCUCCUCAG | 527 |
| 1731 | CCGAAUCCCCUCCCUGUCA | 423 | 1731 | CCGAAUCCCCUCCCUGUCA | 423 | 1749 | UGACAGGGAGGGGAUUCGG | 528 |
| 1749 | AAAGCUGUCACUUCGCGUG | 424 | 1749 | AAAGCUGUCACUUCGCGUG | 424 | 1767 | CACGCGAAGUGACAGCUUU | 529 |
| 1767 | GCCCUCGCUGCUUCUGUGU | 425 | 1767 | GCCCUCGCUGCUUCUGUGU | 425 | 1785 | ACACAGAAGCAGCGAGGGC | 530 |
| 1785 | UGUGGUGAGCAGAAGUGGA | 426 | 1785 | UGUGGUGAGCAGAAGUGGA | 426 | 1803 | UCCACUUCUGCUCACCACA | 531 |
| 1803 | AGCUGGGGGGCGUGGAGAG | 427 | 1803 | AGCUGGGGGGCGUGGAGAG | 427 | 1821 | CUCUCCACGCCCCCCAGCU | 532 |
| 1821 | GCCCGGCGCCCCUGCCACC | 428 | 1821 | GCCCGGCGCCCCUGCCACC | 428 | 1839 | GGUGGCAGGGGCGCCGGGC | 533 |
| 1839 | CUCCCUGACCCGUCUAAUA | 429 | 1839 | CUCCCUGACCCGUCUAAUA | 429 | 1857 | UAUUAGACGGGUCAGGGAG | 534 |
| 1857 | AUAUAAAUAUAGAGAUGUG | 430 | 1857 | AUAUAAAUAUAGAGAUGUG | 430 | 1875 | CACAUCUCUAUAUUUAUAU | 535 |
| 1865 | AUAGAGAUGUGUCUAUGGC | 431 | 1865 | AUAGAGAUGUGUCUAUGGC | 431 | 1883 | GCCAUAGACACAUCUCUAU | 536 |

NM_002750 (MAPK8/JNK1)

| | | | | | | | | |
|---|---|---|---|---|---|---|---|---|
| 3 | UAAUUGCUUGCCAUCAUGA | 537 | 3 | UAAUUGGUUGCCAUCAUGA | 537 | 21 | UCAUGAUGGCAAGCAAUUA | 616 |
| 21 | AGCAGAAGCAAGCGUGACA | 538 | 21 | AGCAGAAGCAAGCGUGACA | 538 | 39 | UGUGACGCUUGCUUCUGCU | 617 |
| 39 | AACAAUUUUUAUAGUGUAG | 539 | 39 | AACAAUUUUUAUAGUGUAG | 539 | 57 | CUACACUAUAAAAAUUGUU | 618 |
| 57 | GAGAUUGGAGAUUCUACAU | 540 | 57 | GAGAUUGGAGAUUCUACAU | 540 | 75 | AUGUAGAAUCUCGAAUCUC | 619 |
| 75 | UUCACAGUCCUGAAACGAU | 541 | 75 | UUCACAGUCCUGAAACGAU | 541 | 93 | AUCGUUUCAGGACUGUGAA | 620 |
| 93 | UAUCAGAAUUUAAAACCUA | 542 | 93 | UAUCAGAAUUUAAAACCUA | 542 | 111 | UAGGUUUUAAAUUCUGAUA | 621 |
| 111 | AUAGGCUCAGGAGCUCAAG | 543 | 111 | AUAGGCUCAGGAGCUCAAG | 543 | 129 | CUUGAGCUCCUGAGCCUAU | 622 |
| 129 | GGAAUAGUAUGGGCAGCUU | 544 | 129 | GGAAUAGUAUGCGCAGCUU | 544 | 147 | AAGCUGCGCAUACUAUUCC | 623 |
| 147 | UAUGAUGCCAUUCUUGAAA | 545 | 147 | UAUGAUGCCAUUCUUGAAA | 545 | 165 | UUUCAAGAAUGGCAUCAUA | 624 |
| 165 | AGAAAUGUUGCAAUCAAGA | 546 | 165 | AGAAAUGUUGCAAUCAAGA | 546 | 183 | UGUUGAUUGCAACAUUUCU | 625 |
| 183 | AAGCUAAGCCGACCAUUUC | 547 | 183 | AAGCUAAGCCGACCAUUUC | 547 | 201 | GAAAUGGUCGGCUUAGCUU | 626 |
| 201 | CAGAAUCAGACUCAUGCCA | 548 | 201 | CAGAAUCAGACUCAUGCCA | 548 | 219 | UGGCAUGAGUCUGAUUCUG | 627 |
| 219 | AAGCGGGCCUACAGAGAGC | 549 | 219 | AAGCGGGCCUACAGAGAGC | 549 | 237 | GCUCUCUGUAGGCCCGCUU | 628 |
| 237 | CUAGUUCUUAUGAAAUGUG | 550 | 237 | CUAGUUCUUAUGAAAUGUG | 550 | 255 | CACAUUUCAUAAGAACUAG | 629 |
| 255 | GUUAAUCACAAAAAUAUAA | 551 | 255 | GUUAAUCACAAAAAUAUAA | 551 | 273 | UUAUAUUUUUGUGAUUAAC | 630 |
| 273 | AUUGGCCUUUUGAAUGUUU | 552 | 273 | AUUGGCCUUUUGAAUGUUU | 552 | 291 | AAACAUUCAAAAGGCCAAU | 631 |
| 291 | UUCACACCACAGAAAUCCC | 553 | 291 | UUCACACCACAGAAAUCCC | 553 | 309 | GGGAUUUCUGUGGUGUGAA | 632 |
| 309 | CUAGAAGAAUUUCAAGAUG | 554 | 309 | CUAGAAGAAUUUCAAGAUG | 554 | 327 | CAUCUUGAAAUUCUUCUAG | 633 |
| 327 | GUUUACAUAGUCAUGGAGC | 555 | 327 | GUUUACAUAGUCAUGGAGC | 555 | 345 | GCUCCAUGACUAUGUAAAC | 634 |
| 345 | CUCAUGGAUGCAAAUCUUU | 556 | 345 | CUCAUGGAUGCAAAUCUUU | 556 | 363 | AAAGAUUUGCAUCCAUGAG | 635 |
| 363 | UGCCAAGUGAUUCAGAUGG | 557 | 363 | UGCCAAGUGAUUCAGAUGG | 557 | 381 | CCAUCUGAAUCACUUGGCA | 636 |
| 381 | GAGCUAGAUCAUGAAAGAA | 558 | 381 | GAGCUAGAUCAUGAAAGAA | 558 | 399 | UUCUUUCAUGAUCUAGCUC | 637 |
| 399 | AUGUCCUACCUUCUCUAUC | 559 | 399 | AUGUCCUACCUUCUCUAUC | 559 | 417 | GAUAGAGAAGGUAGGACAU | 638 |
| 417 | CAGAUGCUGUGUGGAAUCA | 560 | 417 | CAGAUGCUGUGUGGAAUCA | 560 | 435 | UGAUUCCACACAGCAUCUG | 639 |
| 435 | AAGCACCUUCAUUCUGCUG | 561 | 435 | AAGCACCUUCAUUCUGCUG | 561 | 453 | CAGCAGAAUGAAGGUGCUU | 640 |
| 453 | GGAAUUAUUCAUCGGGACU | 562 | 453 | GGAAUUAUUCAUCGGGACU | 562 | 471 | AGUCCCGAUGAAUAAUUCC | 641 |
| 471 | UUAAAGCCCAGUAAUAUAG | 563 | 471 | UUAAAGCCCAGUAAUAUAG | 563 | 489 | CUAUAUUACUGGGCUUUAA | 642 |
| 489 | GUAGUAAAAUCUGAUUGCA | 564 | 489 | GUAGUAAAAUCUGAUUGCA | 564 | 507 | UGCAAUCAGAUUUUACUAC | 643 |
| 507 | ACUUUGAAGAUUCUUGACU | 565 | 507 | ACUUUGAAGAUUCUUGACU | 565 | 525 | AGUCAAGAAUCUUCAAAGU | 644 |
| 525 | UUCGGUCUGGCCAGGACUG | 566 | 525 | UUCGGUCUGGCCAGGACUG | 566 | 543 | CAGUCCUGGCCAGACCGAA | 645 |
| 543 | GCAGGAAGGAGUUUUAUGA | 567 | 543 | GCAGGAACGAGUUUUAUGA | 567 | 561 | UCAUAAAACUCGUUCCUGC | 646 |
| 561 | AUGACGCCUUAUGUAGUGA | 568 | 561 | AUGACGCCUUAUGUAGUGA | 568 | 579 | UCACUACAUAAGGCGUCAU | 647 |
| 579 | ACUCGCUACUACAGAGCAC | 569 | 579 | ACUCGCUACUACAGAGCAC | 569 | 597 | GUGCUCUGUAGUAGCGAGU | 648 |
| 597 | CCCGAGGUCAUCCUUGGCA | 570 | 597 | CCCGAGGUCAUCCUUGGCA | 570 | 615 | UGCCAAGGAUGACCUCGGG | 649 |
| 615 | AUGGGCUACAAGGAAAACG | 571 | 615 | AUGGGCUACAAGGAAAACG | 571 | 633 | CGUUUUCCUUGUAGCCCAU | 650 |
| 633 | GUGGAUUUAUGGUCUGUGG | 572 | 633 | GUGGAUUUAUGGUCUGUGG | 572 | 651 | CCACAGACCAUAAAUCCAC | 651 |
| 651 | GGGUGCAUUAUGGGAGAAA | 573 | 651 | GGGUGCAUUAUGGGAGAAA | 573 | 669 | UUUCUCCCAUAAUGCACCC | 652 |
| 669 | AUGGUUUGCCACAAAAUCC | 574 | 669 | AUGGUUUGCCACAAAAUCG | 574 | 687 | GGAUUUUGUGGCAAACCAU | 653 |
| 687 | CUCUUUCCAGGAAGGGACU | 575 | 687 | CUCUUUCCAGGAAGGGAGU | 575 | 705 | AGUCCCUUCCUGGAAAGAG | 654 |
| 705 | UAUAUUGAUCAGUGGAAUA | 576 | 705 | UAUAUUGAUCAGUGGAAUA | 576 | 723 | UAUUCCACUGAUCAAUAUA | 655 |
| 723 | AAAGUUAUUGAACAGCUUG | 577 | 723 | AAAGUUAUUGAACAGCUUG | 577 | 741 | CAAGCUGUUCAAUAACUUU | 656 |
| 741 | GGAACACCAUGUCCUGAAU | 578 | 741 | GGAACACCAUGUCCUGAAU | 578 | 759 | AUUCAGGACAUGGUGUUCC | 657 |
| 759 | UUCAUGAAGAAACUGCAAG | 579 | 759 | UUCAUGAAGAAACUGCAAC | 579 | 777 | GUUGCAGUUUCUUCAUGAA | 658 |
| 777 | CCAACAGUAAGGACUUACG | 580 | 777 | CCAACAGUAAGGACUUACG | 580 | 795 | CGUAAGUCCUUACUGUUGG | 659 |
| 795 | GUUGAAAACAGACCUAAAU | 581 | 795 | GUUGAAAACAGACGUAAAU | 581 | 813 | AUUUAGGUCUGUUUUCAAC | 660 |
| 813 | UAUGCUGGAUAUAGCUUUG | 582 | 813 | UAUGCUGGAUAUAGCUUUG | 582 | 831 | CAAAGCUAUAUCCAGCAUA | 661 |
| 831 | GAGAAACUCUUCCCUGAUG | 583 | 831 | GAGAAACUCUUCCCUGAUG | 583 | 849 | CAUCAGGGAAGAGUUUCUC | 662 |
| 849 | GUCCUUUUCCCAGCUGACU | 584 | 849 | GUCCUUUUCCCAGCUGACU | 584 | 867 | AGUCAGGUGGGAAAAGGAC | 663 |
| 867 | UCAGAACACAACAAACUUA | 585 | 867 | UCAGAACACAACAAACUUA | 585 | 885 | UAAGUUUGUUGUGUUCUGA | 664 |
| 885 | AAAGCCAGUCAGGCAAGGG | 586 | 885 | AAAGCCAGUCAGGCAAGGG | 586 | 903 | CCCUUGCCUGACUGGCUUU | 665 |
| 903 | GAUUUGUUAUCCAAAAUGC | 587 | 903 | GAUUUGUUAUCCAAAAUGC | 587 | 921 | GCAUUUUGGAUAACAAAUC | 666 |
| 921 | CUGGUAAUAGAUGCAUCUA | 588 | 921 | CUGGUAAUAGAUGCAUCUA | 588 | 939 | UAGAUGCAUGUAUUACCAG | 667 |
| 939 | AAAAGGAUCUCUGUAGAUG | 589 | 939 | AAAAGGAUCUCUGUAGAUG | 589 | 957 | CAUCUACAGAGAUCCUUUU | 668 |
| 957 | GAAGCUCUCCAACACCCGU | 590 | 957 | GAAGCUCUCCAACACCCGU | 590 | 975 | ACGGGUGUUGGAGAGCUUC | 669 |
| 975 | UACAUCAAUGUCUGGUAUG | 591 | 975 | UACAUCAAUGUCUGGUAUG | 591 | 993 | CAUACCAGACAUUGAUGUA | 670 |
| 993 | GAUCCUUCUGAAGCAGAAG | 592 | 993 | GAUCCUUCUGAAGCAGAAG | 592 | 1011 | CUUCUGCUUCAGAAGGAUC | 671 |
| 1011 | GCUCCACCACCAAAGAUCC | 593 | 1011 | GCUCCACCACCAAAGAUCC | 593 | 1029 | GGAUCUUUGGUGGUGGAGC | 672 |
| 1029 | CCUGACAAGCAGUUAGAUG | 594 | 1029 | CCUGACAAGCAGUUAGAUG | 594 | 1047 | CAUCUAACUGCUUGUCAGG | 673 |
| 1047 | GAAAGGGAACACACAAUAG | 595 | 1047 | GAAAGGGAACACACAAUAG | 595 | 1065 | CUAUUGUGUGUUCCCUUUC | 674 |
| 1065 | GAAGAGUGGAAAGAAUUGA | 596 | 1065 | GAAGAGUGGAAAGAAUUGA | 596 | 1083 | UCAAUUCUUUCCACUCUUC | 675 |
| 1083 | AUAUAUAAGGAAGUUAUGG | 597 | 1083 | AUAUAUAAGGAAGUUAUGG | 597 | 1101 | CCAUAACUUCCUUAUAUAU | 676 |
| 1101 | GACUUGGAGGAGAGAACCA | 598 | 1101 | GACUUGGAGGAGAGAACCA | 598 | 1119 | UGGUUCUCUCCUCCAAGUC | 677 |
| 1119 | AAGAAUGGAGUUAUACGGG | 599 | 1119 | AAGAAUGGAGUUAUACGGG | 599 | 1137 | CCCGUAUAACUCCAUUCUU | 678 |
| 1137 | GGGCAGCCCUCUCCUUUAG | 600 | 1137 | GGGCAGCCCUCUCCUUUAG | 600 | 1155 | CUAAAGGAGAGGGCUGCCC | 679 |
| 1155 | GCACAGGUGCAGCAGUGAU | 601 | 1155 | GCACAGGUGCAGCAGUGAU | 601 | 1173 | AUCACUGCUGCACCUGUGC | 680 |
| 1173 | UCAAUGGCUCUCAGCAUCC | 602 | 1173 | UCAAUGGCUCUCAGCAUCC | 602 | 1191 | GGAUGCUGAGAGCCAUUGA | 681 |
| 1191 | CAUCAUCAUCGUCGUCUGU | 603 | 1191 | CAUCAUCAUCGUCGUCUGU | 603 | 1209 | ACAGACGACGAUGAUGAUG | 682 |
| 1209 | UCAAUGAUGUGUCUUCAAU | 604 | 1209 | UCAAUGAUGUGUCUUCAAU | 604 | 1227 | AUUGAAGACACAUCAUUGA | 683 |
| 1227 | UGUCAACAGAUCCGACUUU | 605 | 1227 | UGUCAACAGAUCCGACUUU | 605 | 1245 | AAAGUCGGAUCUGUUGACA | 684 |
| 1245 | UGGCCUCUGAUACAGACAG | 606 | 1245 | UGGCCUCUGAUACAGACAG | 606 | 1263 | CUGUCUGUAUCAGAGGCCA | 685 |
| 1263 | GCAGUCUAGAAGCAGCAGC | 607 | 1263 | GCAGUCUAGAAGCAGCAGC | 607 | 1281 | GCUGCUGCUUCUAGACUGC | 686 |
| 1281 | CUGGGCCUCUGGGCUGCUG | 608 | 1281 | CUGGGCCUCUGGGCUGCUG | 608 | 1299 | CAGCAGCCCAGAGGCCCAG | 687 |
| 1299 | GUAGAUGACUACUUGGGCC | 609 | 1299 | GUAGAUGACUACUUGGGCC | 609 | 1317 | GGCCCAAGUAGUCAUCUAC | 688 |
| 1317 | CAUCGGGGGGUGGGAGGGA | 610 | 1317 | CAUCGGGGGGUGGGAGGGA | 610 | 1335 | UCCCUCCCACCCCCCGAUG | 689 |
| 1335 | AUGGGGAGUCGGUUAGUCA | 611 | 1335 | AUGGGGAGUCGGUUAGUCA | 611 | 1353 | UGACUAACCGACUCCCCAU | 690 |
| 1353 | AUUGAUAGAACUACUUUGA | 612 | 1353 | AUUGAUAGAACUACUUUGA | 612 | 1371 | UCAAAGUAGUUCUAUCAAU | 691 |
| 1371 | AAAACAAUUCAGUGGUCUU | 613 | 1371 | AAAACAAUUCAGUGGUCUU | 613 | 1389 | AAGACCACUGAAUUGUUUU | 692 |
| 1389 | UAUUUUUGGGUGAUUUUUC | 614 | 1389 | UAUUUUUGGGUGAUUUUUC | 614 | 1407 | GAAAAAUCACCCAAAAAUA | 693 |
| 1397 | GGUGAUUUUUCAAAAAAUG | 615 | 1397 | GGUGAUUUUUCAAAAAAUG | 615 | 1415 | CAUUUUUUGAAAAAUCACC | 694 |

NM_139012 (MAPK14/p38)

| | | | | | | | | |
|---|---|---|---|---|---|---|---|---|
| 3 | AACCGCGACCACUGGAGCC | 695 | 3 | AACCGCGACCACUGGAGCC | 695 | 21 | GGCUCCAGUGGUCGCGGUU | 904 |
| 21 | CUUAGCGGGCGCAGCAGCU | 696 | 21 | CUUAGCGGGCGCAGCAGCU | 696 | 39 | AGCUGCUGCGCCCGCUAAG | 905 |
| 39 | UGGAACGGGAGUACUGCGA | 697 | 39 | UGGAACGGGAGUACUGCGA | 697 | 57 | UCGCAGUACUCCCGUUCCA | 906 |
| 57 | ACGCAGCCCGGAGUCGGCC | 698 | 57 | ACGCAGCCCGGAGUCGGCC | 698 | 75 | GGCCGACUCCGGGCUGCGU | 907 |
| 75 | CUUGUAGGGGCGAAGGUGC | 699 | 75 | CUUGUAGGGGCGAAGGUGC | 699 | 93 | GCACCUUCGCCCCUACAAG | 908 |
| 93 | CAGGGAGAUCGCGGCGGGG | 700 | 93 | CAGGGAGAUCGCGGCGGGC | 700 | 111 | GCCCGCCGCGAUCUCCCUG | 909 |
| 111 | CGCAGUCUUGAGCGCCGGA | 701 | 111 | CGCAGUCUUGAGCGGCGGA | 701 | 129 | UCCGGCGCUCAAGACUGCG | 910 |
| 129 | AGCGCGUCCCUGCCCUUAG | 702 | 129 | AGCGCGUCCCUGCCCUUAG | 702 | 147 | CUAAGGGCAGGGACGCGCU | 911 |
| 147 | GCGGGGCUUGCCCCAGUCG | 703 | 147 | GCGGGGCUUGCCCCAGUCG | 703 | 165 | CGACUGGGGCAAGCCCCGC | 912 |
| 165 | GCAGGGGCACAUCCAGCCG | 704 | 165 | GCAGGGGCACAUCCAGCCG | 704 | 183 | CGGCUGGAUGUGCGCCUGC | 913 |
| 183 | GCUGGGGCUGACAGCAGCC | 705 | 183 | GCUGCGGCUGACAGCAGGC | 705 | 201 | GGCUGCUGUCAGCCGCAGC | 914 |
| 201 | CGCGCGCGCGGGAGUCUGC | 706 | 201 | CGCGCGCGCGGGAGUCUGC | 706 | 219 | GCAGACUCCCGCGCGCGCG | 915 |
| 219 | CGGGGUCGCGGCAGCCGCA | 707 | 219 | CGGGGUCGCGGCAGCCGCA | 707 | 237 | UGCGGCUGCCGCGACCCCG | 916 |
| 237 | ACCUGCGCGGGCGACCAGC | 708 | 237 | ACCUGGGCGGGCGACCAGC | 708 | 255 | GCUGGUCGCCCGCGCAGGU | 917 |
| 255 | CGCAAGGUCCCCGCCCGGC | 709 | 255 | CGCAAGGUCCCCGCCCGGC | 709 | 273 | GCCGGGCGGGGACCUUGCG | 918 |
| 273 | CUGGGCGGGCAGCAAGGGC | 710 | 273 | CUGGGCGGGCAGCAAGGGC | 710 | 291 | GCCCUUGCUGCCCGCCCAG | 919 |
| 291 | CCGGGGAGAGGGUGCGGGU | 711 | 291 | CCGGGGAGAGGGUGCGGGU | 711 | 309 | ACCCGCACCCUCUCCCCGG | 920 |
| 309 | UGCAGGCGGGGGCCCCACA | 712 | 309 | UGCAGGCGGGGGCCCCACA | 712 | 327 | UGUGGGGCCCCCGCCUGCA | 921 |
| 327 | AGGGCCACCUUCUUGCCCG | 713 | 327 | AGGGCCACCUUCUUGCCCG | 713 | 345 | CGGGCAAGAAGGUGGCCCU | 922 |
| 345 | GGCGGCUGCCGCUGGAAAA | 714 | 345 | GGCGGCUGCCGCUGGAAAA | 714 | 363 | UUUUCCAGCGGCAGCCGCC | 923 |
| 363 | AUGUCUCAGGAGAGGCCCA | 715 | 363 | AUGUCUCAGGAGAGGCCCA | 715 | 381 | UGGGCCUCUCCUGAGACAU | 924 |
| 381 | ACGUUCUACCGGCAGGAGC | 716 | 381 | ACGUUCUACCGGCAGGAGC | 716 | 399 | GCUCCUGCCGGUAGAACGU | 925 |
| 399 | CUGAACAAGACAAUCUGGG | 717 | 399 | CUGAACAAGACAAUCUGGG | 717 | 417 | CCCAGAUUGUCUUGUUCAG | 926 |
| 417 | GAGGUGCCCGAGCGUUACC | 718 | 417 | GAGGUGCCCGAGCGUUACC | 718 | 435 | GGUAACGCUCGGGCACCUC | 927 |
| 435 | CAGAACCUGUCUCCAGUGG | 719 | 435 | CAGAACCUGUCUCCAGUGG | 719 | 453 | CCACUGGAGACAGGUUCUG | 928 |
| 453 | GGCUCUGGCGCCUAUGGCU | 720 | 453 | GGCUCUGGCGCCUAUGGCU | 720 | 471 | AGCCAUAGGCGCCAGAGCC | 929 |
| 471 | UCUGUGUGUGCUGCUUUUG | 721 | 471 | UCUGUGUGUGCUGCUUUUG | 721 | 489 | CAAAAGCAGCACACACAGA | 930 |
| 489 | GACACAAAAACGGGGUUAC | 722 | 489 | GACACAAAAACGGGGUUAC | 722 | 507 | GUAACCCCGUUUUUGUGUC | 931 |
| 507 | CGUGUGGCAGUGAAGAAGC | 723 | 507 | CGUGUGGCAGUGAAGAAGC | 723 | 525 | GCUUCUUCACUGCCACACG | 932 |
| 525 | CUCUCCAGACCAUUUCAGU | 724 | 525 | CUCUCCAGACCAUUUCAGU | 724 | 543 | ACUGAAAUGGUCUGGAGAG | 933 |
| 543 | UCCAUCAUUCAUGCGAAAA | 725 | 543 | UCCAUCAUUCAUGCGAAAA | 725 | 561 | UUUUCGCAUGAAUGAUGGA | 934 |
| 561 | AGAACCUACAGAGAACUGC | 726 | 561 | AGAACCUACAGAGAACUGC | 726 | 579 | GCAGUUCUCUGUAGGUUCU | 935 |
| 579 | CGGUUACUUAAACAUAUGA | 727 | 579 | CGGUUACUUAAACAUAUGA | 727 | 597 | UCAUAUGUUUAAGUAACCG | 936 |
| 597 | AAACAUGAAAAUGUGAUUG | 728 | 597 | AAACAUGAAAAUGUGAUUG | 728 | 615 | CAAUCACAUUUUCAUGUUU | 937 |
| 615 | GGUCUGUUGGACGUUUUUA | 729 | 615 | GGUCUGUUGGACGUUUUUA | 729 | 633 | UAAAAACGUCCAACAGACC | 938 |
| 633 | ACACCUGCAAGGUCUCUGG | 730 | 633 | ACACCUGCAAGGUCUCUGG | 730 | 651 | CCAGAGACCUUGCAGGUGU | 939 |
| 651 | GAGGAAUUCAAUGAUGUGU | 731 | 651 | GAGGAAUUCAAUGAUGUGU | 731 | 669 | ACACAUCAUUGAAUUCCUC | 940 |
| 669 | UAUCUGGUGACCCAUCUCA | 732 | 669 | UAUCUGGUGACCCAUCUCA | 732 | 687 | UGAGAUGGGUCACCAGAUA | 941 |
| 687 | AUGGGGGCAGAUCUGAACA | 733 | 687 | AUGGGGGCAGAUCUGAACA | 733 | 705 | UGUUCAGAUCUGCCCCCAU | 942 |
| 705 | AACAUUGUGAAAUGUCAGA | 734 | 705 | AACAUUGUGAAAUGUCAGA | 734 | 723 | UCUGACAUUUCACAAUGUU | 943 |
| 723 | AAGCUUACAGAUGACCAUG | 735 | 723 | AAGCUUACAGAUGACCAUG | 735 | 741 | CAUGGUCAUCUGUAAGCUU | 944 |
| 741 | GUUCAGUUCCUUAUCUACC | 736 | 741 | GUUCAGUUCCUUAUCUACC | 736 | 759 | GGUAGAUAAGGAACUGAAC | 945 |
| 759 | CAAAUUCUCCGAGGUCUAA | 737 | 759 | CAAAUUCUCCGAGGUCUAA | 737 | 777 | UUAGACCUCGGAGAAUUUG | 946 |
| 777 | AAGUAUAUAGAUUCAGCUG | 738 | 777 | AAGUAUAUACAUUCAGCUG | 738 | 795 | CAGCUGAAUGUAUAUACUU | 947 |
| 795 | GACAUAAUUCACAGGGACC | 739 | 795 | GACAUAAUUCACAGGGACC | 739 | 813 | GGUCCCUGUGAAUUAUGUC | 948 |
| 813 | CUAAAACCUAGUAAUCUAG | 740 | 813 | CUAAAACCUAGUAAUCUAG | 740 | 831 | CUAGAUUACUAGGUUUUAG | 949 |
| 831 | GCUGUGAAUGAAGACUGUG | 741 | 831 | GCUGUGAAUGAAGACUGUG | 741 | 849 | CACAGUCUUCAUUCACAGC | 950 |
| 849 | GAGCUGAAGAUUCUGGAUU | 742 | 849 | GAGCUGAAGAUUCUGGAUU | 742 | 867 | AAUCCAGAAUCUUCAGCUC | 951 |
| 867 | UUUGGACUGGCUCGGCACA | 743 | 867 | UUUGGACUGGCUCGGCACA | 743 | 885 | UGUGCCGAGCCAGUCCAAA | 952 |
| 885 | ACAGAUGAUGAAAUGACAG | 744 | 885 | ACAGAUGAUGAAAUGACAG | 744 | 903 | CUGUCAUUUCAUCAUCUGU | 953 |
| 903 | GGCUACGUGGCCACUAGGU | 745 | 903 | GGCUACGUGGCCACUAGGU | 745 | 921 | ACCUAGUGGCCACGUAGCC | 954 |
| 921 | UGGUACAGGGCUCCUGAGA | 746 | 921 | UGGUACAGGGCUCCUGAGA | 746 | 939 | UCUCAGGAGGCCUGUACCA | 955 |
| 939 | AUCAUGCUGAACUGGAUGC | 747 | 939 | AUCAUGCUGAACUGGAUGC | 747 | 957 | GCAUCCAGUUCAGCAUGAU | 956 |
| 957 | CAUUACAACCAGACAGUUG | 748 | 957 | CAUUACAACCAGACAGUUG | 748 | 975 | CAACUGUCUGGUUGUAAUG | 957 |
| 975 | GAUAUUUGGUCAGUGGGAU | 749 | 975 | GAUAUUUGGUCAGUGGGAU | 749 | 993 | AUCCCACUGACCAAAUAUC | 958 |
| 993 | UGCAUAAUGGCCGAGCUGU | 750 | 993 | UGCAUAAUGGCCGAGCUGU | 750 | 1011 | ACAGCUCGGCCAUUAUGCA | 959 |
| 1011 | UUGACUGGAAGAACAUUGU | 751 | 1011 | UUGACUGGAAGAACAUUGU | 751 | 1029 | ACAAUGUUCUUCCAGUCAA | 960 |
| 1029 | UUUCCUGGUACAGACCAUA | 752 | 1029 | UUUCCUGGUACAGACCAUA | 752 | 1047 | UAUGGUCUGUACCAGGAAA | 961 |
| 1047 | AUUGAUCAGUUGAAGCUCA | 753 | 1047 | AUUGAUCAGUUGAAGCUCA | 753 | 1065 | UGAGCUUCAACUGAUCAAU | 962 |
| 1065 | AUUUUAAGACUCGUUGGAA | 754 | 1065 | AUUUUAAGACUCGUUGGAA | 754 | 1083 | UUCCAACGAGUCUUAAAAU | 963 |
| 1083 | ACCCCAGGGGCUGAGCUUU | 755 | 1083 | ACCCCAGGGGCUGAGCUUU | 755 | 1101 | AAAGCUCAGCCCCUGGGGU | 964 |
| 1101 | UUGAAGAAAAUCUCCUCAG | 756 | 1101 | UUGAAGAAAAUCUCCUCAG | 756 | 1119 | CUGAGGAGAUUUUCUUCAA | 965 |
| 1119 | GAGUCUGCAAGAAACUAUA | 757 | 1119 | GAGUCUGCAAGAAACUAUA | 757 | 1137 | UAUAGUUUCUUGCAGACUC | 966 |
| 1137 | AUUCAGUCUUUGACUCAGA | 758 | 1137 | AUUCAGUCUUUGACUCAGA | 758 | 1155 | UCUGAGUCAAAGACUGAAU | 967 |
| 1155 | AUGCCGAAGAUGAACUUUG | 759 | 1155 | AUGCCGAAGAUGAACUUUG | 759 | 1173 | CAAAGUUCAUCUUCGGCAU | 968 |
| 1173 | GCGAAUGUAUUUAUUGGUG | 760 | 1173 | GCGAAUGUAUUUAUUGGUG | 760 | 1191 | CACCAAUAAAUACAUUCGC | 969 |
| 1191 | GCCAAUCCCCUGGCUGUCG | 761 | 1191 | GCCAAUCCCCUGGCUGUCG | 761 | 1209 | CGACAGCCAGGGGAUUGGC | 970 |
| 1209 | GACUUGCUGGAGAAGAUGC | 762 | 1209 | GACUUGCUGGAGAAGAUGC | 762 | 1227 | GCAUCUUCUCCAGCAAGUC | 971 |
| 1227 | CUUGUAUUGGACUCAGAUA | 763 | 1227 | CUUGUAUUGGACUCAGAUA | 763 | 1245 | UAUCUGAGUCCAAUACAAG | 972 |
| 1245 | AAGAGAAUUACAGCGGCCC | 764 | 1245 | AAGAGAAUUACAGCGGCCC | 764 | 1263 | GGGCCGCUGUAAUUCUCUU | 973 |
| 1263 | CAAGCCCUUGCACAUGCCU | 765 | 1263 | CAAGCCCUUGCACAUGCCU | 765 | 1281 | AGGCAUGUGCAAGGGCUUG | 974 |
| 1281 | UACUUUGCUCAGUACCAGG | 766 | 1281 | UACUUUGCUCAGUAGCACG | 766 | 1299 | CGUGGUACUGAGCAAAGUA | 975 |
| 1299 | GAUCCUGAUGAUGAACCAG | 767 | 1299 | GAUCCUGAUGAUGAACCAG | 767 | 1317 | CUGGUUCAUCAUCAGGAUC | 976 |
| 1317 | GUGGCCGAUCCUUAUGAUC | 768 | 1317 | GUGGCCGAUCCUUAUGAUC | 768 | 1335 | GAUCAUAAGGAUCGGCCAC | 977 |
| 1335 | CAGUCCUUUGAAAGCAGGG | 769 | 1335 | CAGUCCUUUGAAAGGAGGG | 769 | 1353 | CCCUGCUUUCAAAGGACUG | 978 |
| 1353 | GACCUCCUUAUAGAUGAGU | 770 | 1353 | GACCUCCUUAUAGAUGAGU | 770 | 1371 | ACUCAUCUAUAAGGAGGUC | 979 |
| 1371 | UGGAAAAGCCUGACCUAUG | 771 | 1371 | UGGAAAAGCCUGACCUAUG | 771 | 1389 | CAUAGGUCAGGCUUUUCCA | 980 |
| 1389 | GAUGAAGUCAUCAGCUUUG | 772 | 1389 | GAUGAAGUCAUCAGCUUUG | 772 | 1407 | CAAAGCUGAUGACUUCAUC | 981 |
| 1407 | GUGCCACCACCCCUUGACC | 773 | 1407 | GUGCCACCACCCCUUGACC | 773 | 1425 | GGUCAAGGGGUGGUGGCAC | 982 |
| 1425 | CAAGAAGAGAUGGAGUCCU | 774 | 1425 | CAAGAAGAGAUGGAGUCCU | 774 | 1443 | AGGACUCCAUCUCUUCUUG | 983 |
| 1443 | UGAGCACCUGGUUUCUGUU | 775 | 1443 | UGAGCACCUGGUUUCUGUU | 775 | 1461 | AACAGAAACCAGGUGGUCA | 984 |
| 1461 | UCUGUUGAUCCCACUUCAC | 776 | 1461 | UCUGUUGAUCCCACUUCAC | 776 | 1479 | GUGAAGUGGGAUCAACAGA | 985 |
| 1479 | CUGUGAGGGGAAGGCCUUU | 777 | 1479 | CUGUGAGGGGAAGGCCUUU | 777 | 1497 | AAAGGCCUUCCCCUCACAG | 986 |
| 1497 | UUCACGGGAACUCUCCAAA | 778 | 1497 | UUCACGGGAACUCUCCAAA | 778 | 1515 | UUUGGAGAGUUCCCGUGAA | 987 |
| 1515 | AUAUUAUUCAAGUGCCUCU | 779 | 1515 | AUAUUAUUCAAGUGCCUCU | 779 | 1533 | AGAGGCACUUGAAUAAUAU | 988 |
| 1533 | UUGUUGCAGAGAUUUCCUC | 780 | 1533 | UUGUUGCAGAGAUUUCCUC | 780 | 1551 | GAGGAAAUCUCUGCAACAA | 989 |
| 1551 | CCAUGGUGGAAGGGGGUGU | 781 | 1551 | CCAUGGUGGAAGGGGGUGU | 781 | 1569 | ACACCCCCUUCCACCAUGG | 990 |
| 1569 | UGCGUGCGUGUGCGUGCGU | 782 | 1569 | UGCGUGCGUGUGCGUGCGU | 782 | 1587 | ACGCACGCACACGCACGCA | 991 |
| 1587 | UGUUAGUGUGUGUGCAUGU | 783 | 1587 | UGUUAGUGUGUGUGCAUGU | 783 | 1605 | ACAUGCACACACACUAACA | 992 |
| 1605 | UGUGUGUCUGUCUUUGUGG | 784 | 1605 | UGUGUGUCUGUCUUUGUGG | 784 | 1623 | CCACAAAGAGAGACACACA | 993 |
| 1623 | GGAGGGUAAGACAAUAUGA | 785 | 1623 | GGAGGGUAAGACAAUAUGA | 785 | 1641 | UCAUAUUGUCUUACCCUCC | 994 |
| 1641 | AACAAACUAUGAUCACAGU | 786 | 1641 | AACAAACUAUGAUCACAGU | 786 | 1659 | ACUGUGAUCAUAGUUUGUU | 995 |
| 1659 | UGACUUUACAGGAGGUUGU | 787 | 1659 | UGACUUUACAGGAGGUUGU | 787 | 1677 | ACAACCUCCUGUAAAGUCA | 996 |
| 1677 | UGGAUGCUCCAGGGCAGCC | 788 | 1677 | UGGAUGCUCCAGGGCAGCC | 788 | 1695 | GGCUGCCCUGGAGCAUCCA | 997 |
| 1695 | CUCCACCUUGCUCUUCUUU | 789 | 1695 | CUCCACCUUGCUCUUCUUU | 789 | 1713 | AAAGAAGAGCAAGGUGGAG | 998 |
| 1713 | UCUGAGAGUUGGCUCAGGC | 790 | 1713 | UCUGAGAGUUGGCUCAGGC | 790 | 1731 | GCCUGAGCCAACUCUCAGA | 999 |
| 1731 | CAGACAAGAGCUGCUGUCC | 791 | 1731 | CAGACAAGAGCUGCUGUCC | 791 | 1749 | GGACAGCAGCUCUUGUCUG | 1000 |
| 1749 | CUUUUAGGAAUAUGUUCAA | 792 | 1749 | CUUUUAGGAAUAUGUUCAA | 792 | 1767 | UUGAACAUAUUCCUAAAAG | 1001 |
| 1767 | AUGCAAAGUAAAAAAAUAU | 793 | 1767 | AUGCAAAGUAAAAAAAUAU | 793 | 1785 | AUAUUUUUUUACUUUGCAU | 1002 |
| 1785 | UGAAUUGUCCCCAAUCCCG | 794 | 1785 | UGAAUUGUCGCCAAUCCCG | 794 | 1803 | CGGGAUUGGGGACAAUUCA | 1003 |
| 1803 | GGUCAUGCUUUUGCCACUU | 795 | 1803 | GGUCAUGCUUUUGCCACUU | 795 | 1821 | AAGUGGCAAAAGCAUGACC | 1004 |
| 1821 | UUGGCUUCUCCUGUGACCC | 796 | 1821 | UUGGCUUCUCCUGUGACCC | 796 | 1839 | GGGUCACAGGAGAAGCCAA | 1005 |
| 1839 | CCACCUUGACGGUGGGGCG | 797 | 1839 | CCACCUUGACGGUGGGGCG | 797 | 1857 | CGCGCCACCGUCAAGGUGG | 1006 |
| 1857 | GUAGACUUGACAACAUCCC | 798 | 1857 | GUAGACUUGACAACAUCCC | 798 | 1875 | GGGAUGUUGUCAAGUCUAC | 1007 |
| 1875 | CACAGUGGCACGGAGAGAA | 799 | 1875 | CACAGUGGCACGGAGAGAA | 799 | 1893 | UUCUCUCCGUGCCACUGUG | 1008 |
| 1893 | AGGCCCAUACCUUCUGGUU | 800 | 1893 | AGGCCCAUACCUUCUGGUU | 800 | 1911 | AACCAGAAGGUAUGGGCCU | 1009 |
| 1911 | UGCUUCAGACCUGACACCG | 801 | 1911 | UGCUUCAGACCUGACACCG | 801 | 1929 | CGGUGUCAGGUCUGAAGCA | 1010 |
| 1929 | GUCCCUCAGUGAUAGGUAC | 802 | 1929 | GUCCCUCAGUGAUACGUAC | 802 | 1947 | GUACGUAUCACUGAGGGAC | 1011 |
| 1947 | CAGCCAAAAAGGACCAACU | 803 | 1947 | CAGCCAAAAAGGACGAACU | 803 | 1965 | AGUUGGUCCUUUUUGGCUG | 1012 |
| 1965 | UGGCUUCUGUGCACUAGCG | 804 | 1965 | UGGCUUCUGUGCACUAGCC | 804 | 1983 | GGCUAGUGCACAGAAGCCA | 1013 |
| 1983 | GUGUGAUUAACUUGCUUAG | 805 | 1983 | CUGUGAUUAACUUGCUUAG | 805 | 2001 | CUAAGCAAGUUAAUCACAG | 1014 |
| 2001 | GUAUGGUUCUCAGAUCUUG | 806 | 2001 | GUAUGGUUCUCAGAUCUUG | 806 | 2019 | CAAGAUCUGAGAACCAUAC | 1015 |
| 2019 | GACAGUAUAUUUGAAACUG | 807 | 2019 | GACAGUAUAUUUGAAACUG | 807 | 2037 | CAGUUUCAAAUAUACUGUC | 1016 |
| 2037 | GUAAAUAUGUUUGUGCCUU | 808 | 2037 | GUAAAUAUGUUUGUGGCUU | 808 | 2055 | AAGGCACAAACAUAUUUAC | 1017 |
| 2055 | UAAAAGGAGAGAAGAAAGU | 809 | 2055 | UAAAAGGAGAGAAGAAAGU | 809 | 2073 | ACUUUCUUCUCUCCUUUUA | 1018 |
| 2073 | UGUAGAUAGUUAAAAGACU | 810 | 2073 | UGUAGAUAGUUAAAAGACU | 810 | 2091 | AGUCUUUUAACUAUCUACA | 1019 |
| 2091 | UGCAGCUGCUGAAGUUCUG | 811 | 2091 | UGCAGCUGCUGAAGUUCUG | 811 | 2109 | CAGAACUUCAGCAGCUGCA | 1020 |
| 2109 | GAGCCGGGCAAGUCGAGAG | 812 | 2109 | GAGCCGGGCAAGUCGAGAG | 812 | 2127 | CUCUCGACUUGCCCGGCUC | 1021 |
| 2127 | GGGCUGUUGGACAGCUGCU | 813 | 2127 | GGGCUGUUGGACAGCUGCU | 813 | 2145 | AGCAGCUGUCCAACAGCCC | 1022 |
| 2145 | UUGUGGGCCCGGAGUAAUC | 814 | 2145 | UUGUGGGCCCGGAGUAAUC | 814 | 2163 | GAUUACUCCGGGCCCACAA | 1023 |
| 2163 | CAGGCAGCCUUCAUAGGCG | 815 | 2163 | CAGGCAGCCUUCAUAGGCG | 815 | 2181 | GGCCUAUGAAGGCUGCCUG | 1024 |
| 2181 | GGUCAUGUGUGCAUGUGAG | 816 | 2181 | GGUCAUGUGUGCAUGUGAG | 816 | 2199 | CUCACAUGCACACAUGACC | 1025 |
| 2199 | GCACAUGCGUAUAUGUGCG | 817 | 2199 | GCACAUGCGUAUAUGUGCG | 817 | 2217 | CGCACAUAUACGCAUGUGC | 1026 |
| 2217 | GUCUCUCUUUCUCCCUCAC | 818 | 2217 | GUCUCUCUUUCUCCCUCAC | 818 | 2235 | GUGAGGGAGAAAGAGAGAC | 1027 |
| 2235 | CCCCCAGGUGUUGCCAUUU | 819 | 2235 | CCCCCAGGUGUUGCCAUUU | 819 | 2253 | AAAUGGCAACACCUGGGGG | 1028 |
| 2253 | UGUCUGCUUACCCUUCACC | 820 | 2253 | UCUCUGCUUACGCUUCACC | 820 | 2271 | GGUGAAGGGUAAGCAGAGA | 1029 |
| 2271 | CUUUGGUGCAGAGGUUUCU | 821 | 2271 | CUUUGGUGCAGAGGUUUCU | 821 | 2289 | AGAAACCUCUGCACCAAAG | 1030 |
| 2289 | UUGAAUAUCUGCCCCAGUA | 822 | 2289 | UUGAAUAUCUGCCCCAGUA | 822 | 2307 | UACUGGGGCAGAUAUUCAA | 1031 |
| 2307 | AGUCAGAAGCAGGUUCUUG | 823 | 2307 | AGUCAGAAGCAGGUUCUUG | 823 | 2325 | CAAGAACCUGCUUCUGACU | 1032 |
| 2325 | GAUGUCAUGUACUUCCUGU | 824 | 2325 | GAUGUCAUGUACUUCCUGU | 824 | 2343 | ACAGGAAGUACAUGACAUC | 1033 |
| 2343 | UGUACUCUUUAUUUCUAGC | 825 | 2343 | UGUACUCUUUAUUUCUAGC | 825 | 2361 | GCUAGAAAUAAAGAGUACA | 1034 |
| 2361 | CAGAGUGAGGAUGUGUUUU | 826 | 2361 | CAGAGUGAGGAUGUGUUUU | 826 | 2379 | AAAACACAUCCUCACUCUG | 1035 |
| 2379 | UGCACGUCUUGCUAUUUGA | 827 | 2379 | UGCACGUCUUGCUAUUUGA | 827 | 2397 | UCAAAUAGCAAGACGUGCA | 1036 |
| 2397 | AGCAUGCACAGCUGCUUGU | 828 | 2397 | AGCAUGCACAGCUGCUUGU | 828 | 2415 | ACAAGCAGCUGUGCAUGCU | 1037 |
| 2415 | UCCUGCUCUCUUCAGGAGG | 829 | 2415 | UCCUGCUCUCUUCAGGAGG | 829 | 2433 | CCUGCUGAAGAGAGCAGGA | 1038 |
| 2433 | GCCCUGGUGUCAGGCAGGU | 830 | 2433 | GCCCUGGUGUCAGGCAGGU | 830 | 2451 | ACCUGCCUGACACCAGGGC | 1039 |
| 2451 | UUUGCCAGUGAAGACUUCU | 831 | 2451 | UUUGCCAGUGAAGACUUCU | 831 | 2469 | AGAAGUCUUCACUGGCAAA | 1040 |
| 2469 | UUGGGUAGUUUAGAUCCCA | 832 | 2469 | UUGGGUAGUUUAGAUCCCA | 832 | 2487 | UGGGAUCUAAACUACCCAA | 1041 |
| 2487 | AUGUCACCUCAGCUGAUAU | 833 | 2487 | AUGUCACCUCAGCUGAUAU | 833 | 2505 | AUAUCAGCUGAGGUGACAU | 1042 |
| 2505 | UUAUGGCAAGUGAUAUCAC | 834 | 2505 | UUAUGGCAAGUGAUAUCAC | 834 | 2523 | GUGAUAUCACUUGCCAUAA | 1043 |
| 2523 | CCUCUCUUCAGCCCCUAGU | 835 | 2523 | CCUCUCUUCAGCCCCUAGU | 835 | 2541 | ACUAGGGGCUGAAGAGAGG | 1044 |
| 2541 | UGCUAUUCUGUGUUGAAGA | 836 | 2541 | UGCUAUUCUGUGUUGAACA | 836 | 2559 | UGUUCAACACAGAAUAGCA | 1045 |
| 2559 | ACAAUUGAUACUUCAGGUG | 837 | 2559 | ACAAUUGAUACUUCAGGUG | 837 | 2577 | CACCUGAAGUAUCAAUUGU | 1046 |
| 2577 | GCUUUUGAUGUGAAAAUCA | 838 | 2577 | GCUUUUGAUGUGAAAAUCA | 838 | 2595 | UGAUUUUCACAUCAAAAGC | 1047 |
| 2595 | AUGAAAAGAGGAACAGGUG | 839 | 2595 | AUGAAAAGAGGAACAGGUG | 839 | 2613 | CACCUGUUCCUCUUUUCAU | 1048 |
| 2613 | GGAUGUAUAGCAUUUUUAU | 840 | 2613 | GGAUGUAUAGCAUUUUUAU | 840 | 2631 | AUAAAAAUGCUAUACAUCC | 1049 |
| 2631 | UUCAUGCCAUCUGUUUUCA | 841 | 2631 | UUCAUGCCAUCUGUUUUCA | 841 | 2649 | UGAAAACAGAUGGCAUGAA | 1050 |
| 2649 | AACCAACUAUUUUUGAGGA | 842 | 2649 | AACCAACUAUUUUUGAGGA | 842 | 2667 | UCCUCAAAAAUAGUUGGUU | 1051 |
| 2667 | AAUUAUCAUGGGAAAAGAC | 843 | 2667 | AAUUAUCAUGGGAAAAGAC | 843 | 2685 | GUCUUUUCCCAUGAUAAUU | 1052 |
| 2685 | CCAGGGCUUUUCCCAGGAA | 844 | 2685 | CCAGGGCUUUUCCCAGGAA | 844 | 2703 | UUCCUGGGAAAAGCCCUGG | 1053 |
| 2703 | AUAUCCCAAACUUCGGAAA | 845 | 2703 | AUAUCCCAAACUUCGGAAA | 845 | 2721 | UUUCCGAAGUUUGGGAUAU | 1054 |
| 2721 | ACAAGUUAUUCUGUUCACU | 846 | 2721 | ACAAGUUAUUCUCUUCACU | 846 | 2739 | AGUGAAGAGAAUAACUUGU | 1055 |
| 2739 | UCCCAAUAACUAAUGCUAA | 847 | 2739 | UCCCAAUAACUAAUGCUAA | 847 | 2757 | UUAGCAUUAGUUAUUGGGA | 1056 |
| 2757 | AGAAAUGCUGAAAAUCAAA | 848 | 2757 | AGAAAUGCUGAAAAUCAAA | 848 | 2775 | UUUGAUUUUCAGCAUUUCU | 1057 |
| 2775 | AGUAAAAAAUUAAAGCCCA | 849 | 2775 | AGUAAAAAAUUAAAGCCCA | 849 | 2793 | UGGGGUUUAAUUUUUUACU | 1058 |
| 2793 | AUAAGGCCAGAAACUCCUU | 850 | 2793 | AUAAGGCCAGAAACUCCUU | 850 | 2811 | AAGGAGUUUCUGGCCUUAU | 1059 |
| 2811 | UUUGCUGUCUUUCUCUAAA | 851 | 2811 | UUUGCUGUCUUUCUCUAAA | 851 | 2829 | UUUAGAGAAAGACAGCAAA | 1060 |
| 2829 | AUAUGAUUACUUUAAAAUA | 852 | 2829 | AUAUGAUUACUUUAAAAUA | 852 | 2847 | UAUUUUAAAGUAAUGAUAU | 1061 |
| 2847 | AAAAAAGUAACAAGGUGUC | 853 | 2847 | AAAAAAGUAACAAGGUGUC | 853 | 2865 | GACACCUUGUUACUUUUUU | 1062 |
| 2865 | CUUUUCCACUCCUAUGGAA | 854 | 2865 | CUUUUCCACUCCUAUGGAA | 854 | 2883 | UUCCAUAGGAGUGGAAAAG | 1063 |
| 2883 | AAAGGGUCUUCUUGGCAGC | 855 | 2883 | AAAGGGUCUUCUUGGCAGC | 855 | 2901 | GCUGCCAAGAAGACCCUUU | 1064 |
| 2901 | CUUAACAUUGACUUCUUGG | 856 | 2901 | CUUAACAUUGACUUCUUGG | 856 | 2919 | CCAAGAAGUCAAUGUUAAG | 1065 |
| 2919 | GUUUGGGGAGAAAUAAAUU | 857 | 2919 | GUUUGGGGAGAAAUAAAUU | 857 | 2937 | AAUUUAUUUCUCCCCAAAC | 1066 |
| 2937 | UUUGUUUCAGAAUUUUGUA | 858 | 2937 | UUUGUUUCAGAAUUUUGUA | 858 | 2955 | UACAAAAUUGUGAAACAAA | 1067 |
| 2955 | AUAUUGUAGGAAUCCCUUU | 859 | 2955 | AUAUUGUAGGAAUCCCUUU | 859 | 2973 | AAAGGGAUUCCUACAAUAU | 1068 |
| 2973 | UGAGAAUGUGAUUCCUUUU | 860 | 2973 | UGAGAAUGUGAUUCCUUUU | 860 | 2991 | AAAAGGAAUCACAUUCUCA | 1069 |
| 2991 | UGAUGGGGAGAAAGGGCAA | 861 | 2991 | UGAUGGGGAGAAAGGGCAA | 861 | 3009 | UUGCCCUUUCUCCCCAUCA | 1070 |
| 3009 | AAUUAUUUUAAUAUUUUGU | 862 | 3009 | AAUUAUUUUAAUAUUUUGU | 862 | 3027 | ACAAAAUAUUAAAAUAAUU | 1071 |
| 3027 | UAUUUUCAACUUUAUAAAG | 863 | 3027 | UAUUUUCAACUUUAUAAAG | 863 | 3045 | CUUUAUAAAGUUGAAAAUA | 1072 |
| 3045 | GAUAAAAUAUCCUCAGGGG | 864 | 3045 | GAUAAAAUAUCCUCAGGGG | 864 | 3063 | CCCCUGAGGAUAUUUUAUC | 1073 |
| 3063 | GUGGAGAAGUGUCGUUUUC | 865 | 3063 | GUGGAGAAGUGUCGUUUUC | 865 | 3081 | GAAAACGACACUUCUCCAC | 1074 |
| 3081 | CAUAACUUGCUGAAUUUCA | 866 | 3081 | CAUAACUUGCUGAAUUUCA | 866 | 3099 | UGAAAUUCAGCAAGUUAUG | 1075 |
| 3099 | AGGCAUUUUGUUCUACAUG | 867 | 3099 | AGGCAUUUUGUUCUACAUG | 867 | 3117 | CAUGUAGAACAAAAUGCCU | 1076 |
| 3117 | GAGGACUCAUAUAUUUAAG | 868 | 3117 | GAGGACUCAUAUAUUUAAG | 868 | 3135 | CUUAAAUAUAUGAGUCCUC | 1077 |
| 3135 | GCCUUUUGUGUAAUAAGAA | 869 | 3135 | GCCUUUUGUGUAAUAAGAA | 869 | 3153 | UUCUUAUUACACAAAAGGC | 1078 |
| 3153 | AAGUAUAAAGUCACUUCCA | 870 | 3153 | AAGUAUAAAGUCACUUCCA | 870 | 3171 | UGGAAGUGACUUUAUACUU | 1079 |
| 3171 | AGUGUUGGCUGUGUGACAG | 871 | 3171 | AGUGUUGGGUGUGUGACAG | 871 | 3189 | CUGUCACACAGCCAACACU | 1080 |
| 3189 | GAAUCUUGUAUUUGGGCCA | 872 | 3189 | GAAUCUUGUAUUUGGGCCA | 872 | 3207 | UGGCCCAAAUACAAGAUUC | 1081 |
| 3207 | AAGGUGUUUCCAUUUCUCA | 873 | 3207 | AAGGUGUUUCCAUUUCUCA | 873 | 3225 | UGAGAAAUGGAAACACCUU | 1082 |
| 3225 | AAUCAGUGCAGUGAUACAU | 874 | 3225 | AAUCAGUGCAGUGAUACAU | 874 | 3243 | AUGUAUCACUGCACUGAUU | 1083 |
| 3243 | UGUACUCCAGAGGGACAGG | 875 | 3243 | UGUACUCCAGAGGGACAGG | 875 | 3261 | CCUGUCCCUCUGGAGUACA | 1084 |
| 3261 | GGUGGACCCCCUGAGUCAA | 876 | 3261 | GGUGGACCCCCUGAGUCAA | 876 | 3279 | UUGACUCAGGGGGUCCACC | 1085 |
| 3279 | ACUGGAGCAAGAAGGAAGG | 877 | 3279 | ACUGGAGCAAGAAGGAAGG | 877 | 3297 | CCUUCCUUCUUGCUCCAGU | 1086 |
| 3297 | GAGGCAGACUGAUGGCGAU | 878 | 3297 | GAGGCAGACUGAUGGCGAU | 878 | 3315 | AUCGCCAUCAGUCUGCCUC | 1087 |
| 3315 | UUCCCUCUCACCCGGGACU | 879 | 3315 | UUCCCUCUCACCCGGGACU | 879 | 3333 | AGUCCCGGGUGAGAGGGAA | 1088 |
| 3333 | UCUCCCCCUUUCAAGGAAA | 880 | 3333 | UCUCCCCCUUUCAAGGAAA | 880 | 3351 | UUUCCUUGAAAGGGGGAGA | 1089 |
| 3351 | AGUGAACCUUUAAAGUAAA | 881 | 3351 | AGUGAACCUUUAAAGUAAA | 881 | 3369 | UUUACUUUAAAGGUUCACU | 1090 |
| 3369 | AGGCCUCAUCUCCUUUAUU | 882 | 3369 | AGGCCUCAUCUCCUUUAUU | 882 | 3387 | AAUAAAGGAGAUGAGGCCU | 1091 |
| 3387 | UGCAGUUCAAAUCCUCACC | 883 | 3387 | UGCAGUUCAAAUCCUCACC | 883 | 3405 | GGUGAGGAUUUGAACUGCA | 1092 |
| 3405 | CAUCCACAGCAAGAUGAAU | 884 | 3405 | CAUCCACAGCAAGAUGAAU | 884 | 3423 | AUUCAUCUUGCUGUGGAUG | 1093 |
| 3423 | UUUUAUCAGCCAUGUUUGG | 885 | 3423 | UUUUAUCAGCCAUGUUUGG | 885 | 3441 | CCAAACAUGGCUGAUAAAA | 1094 |
| 3441 | GUUGUAAAUGCUCGUGUGA | 886 | 3441 | GUUGUAAAUGCUCGUGUGA | 886 | 3459 | UCACACGAGCAUUUACAAC | 1095 |
| 3459 | AUUUCCUACAGAAAUACUG | 887 | 3459 | AUUUCCUACAGAAAUACUG | 887 | 3477 | CAGUAUUUGUGUAGGAAAU | 1096 |
| 3477 | GCUCUGAAUAUUUUGUAAU | 888 | 3477 | GCUCUGAAUAUUUUGUAAU | 888 | 3495 | AUUACAAAAUAUUCAGAGC | 1097 |
| 3495 | UAAAGGUCUUUGCACAUGU | 889 | 3495 | UAAAGGUCUUUGCACAUGU | 889 | 3513 | ACAUGUGCAAAGACCUUUA | 1098 |
| 3513 | UGACCACAUACGUGUUAGG | 890 | 3513 | UGACCACAUACGUGUUAGG | 890 | 3531 | CCUAACACGUAUGUGGUCA | 1099 |
| 3531 | GAGGCUGCAUGCUCUGGAA | 891 | 3531 | GAGGCUGCAUGCUCUGGAA | 891 | 3549 | UUCCAGAGCAUGCAGCCUC | 1100 |
| 3549 | AGCCUGGACUCUAAGCUGG | 892 | 3549 | AGCCUGGACUCUAAGCUGG | 892 | 3567 | CCAGCUUAGAGUCCAGGCU | 1101 |
| 3567 | GAGCUCUUGGAAGAGCUCU | 893 | 3567 | GAGCUCUUGGAAGAGCUGU | 893 | 3585 | AGAGCUCUUCCAAGAGCUC | 1102 |
| 3585 | UUCGGUUUCUGAGCAUAAU | 894 | 3585 | UUCGGUUUCUGAGCAUAAU | 894 | 3603 | AUUAUGCUCAGAAACCGAA | 1103 |
| 3603 | UGCUCCCAUCUCCUGAUUU | 895 | 3603 | UGCUCCCAUCUCCUGAUUU | 895 | 3621 | AAAUCAGGAGAUGGGAGCA | 1104 |
| 3621 | UCUCUGAACAGAAAACAAA | 896 | 3621 | UCUCUGAACAGAAAACAAA | 896 | 3639 | UUUGUUUUCUGUUCAGAGA | 1105 |
| 3639 | AAGAGAGAAUGAGGGAAAU | 897 | 3639 | AAGAGAGAAUGAGGGAAAU | 897 | 3657 | AUUUCCCUCAUUCUCUCUU | 1106 |
| 3657 | UUGCUAUUUUAUUUGUAUU | 898 | 3657 | UUGCUAUUUUAUUUGUAUU | 898 | 3675 | AAUACAAAUAAAAUAGCAA | 1107 |
| 3675 | UCAUGAACUUGGCUGUAAU | 899 | 3675 | UCAUGAACUUGGCUGUAAU | 899 | 3693 | AUUACAGCCAAGUUCAUGA | 1108 |
| 3693 | UCAGUUAUGCCGUAUAGGA | 900 | 3693 | UCAGUUAUGCCGUAUAGGA | 900 | 3711 | UCCUAUACGGCAUAACUGA | 1109 |
| 3711 | AUGUCAGACAAUACCACUG | 901 | 3711 | AUGUCAGACAAUACCACUG | 901 | 3729 | CAGUGGUAUUGUCUGACAU | 1110 |
| 3729 | GGUUAAAAUAAAGCCUAUU | 902 | 3729 | GGUUAAAAUAAAGGCUAUU | 902 | 3747 | AAUAGGCUUUAUUUUAACC | 1111 |
| 3737 | UAAAGCCUAUUUUUCAAAU | 903 | 3737 | UAAAGCCUAUUUUUCAAAU | 903 | 3755 | AUUUGAAAAAUAGGCUUUA | 1112 |

hJUN NM_002228

| 3 | AGUUGCACUGAGUGUGGCU | 1247 | 3 | AGUUGCACUGAGUGUGGCU | 1247 | 21 | AGCCACACUCAGUGCAACU | 1428 |
|---|---|---|---|---|---|---|---|---|
| 21 | UGAAGCAGCGAGGCGGGAG | 1248 | 21 | UGAAGCAGCGAGGCGGGAG | 1248 | 39 | CUCCCGCCUCGCUGCUUCA | 1429 |
| 39 | GUGGAGGUGCGCGGAGUCA | 1249 | 39 | GUGGAGGUGCGCGGAGUCA | 1249 | 57 | UGACUCCGCGCACCUCCAC | 1430 |
| 57 | AGGCAGACAGACAGACACA | 1250 | 57 | AGGCAGACAGACAGACACA | 1250 | 75 | UGUGUCUGUCUGUCUGCCU | 1431 |
| 75 | AGCCAGCCAGCCAGGUCGG | 1251 | 75 | AGCCAGCCAGCCAGGUCGG | 1251 | 93 | CCGACCUGGCUGGCUGGCU | 1432 |
| 93 | GCAGUAUAGUCCGAACUGC | 1252 | 93 | GCAGUAUAGUCCGAACUGC | 1252 | 111 | GCAGUUCGGACUAUACUGC | 1433 |
| 111 | CAAAUCUUAUUUUCUUUUC | 1253 | 111 | CAAAUCUUAUUUUCUUUUC | 1253 | 129 | GAAAAGAAAAUAAGAUUUG | 1434 |
| 129 | CACCUUCUCUCUAACUGCC | 1254 | 129 | CACCUUCUCUCUAACUGCC | 1254 | 147 | GGCAGUUAGAGAGAAGGUG | 1435 |
| 147 | CCAGAGCUAGCGCCUGUGG | 1255 | 147 | CCAGAGCUAGCGCCUGUGG | 1255 | 165 | CCACAGGCGCUAGCUCUGG | 1436 |
| 165 | GCUCCCGGGCUGGUGGUUC | 1256 | 165 | GCUCCCGGGCUGGUGGUUC | 1256 | 183 | GAACCACCAGCCCGGGAGC | 1437 |
| 183 | CGGGAGUGUCCAGAGAGCC | 1257 | 183 | CGGGAGUGUCCAGAGAGCC | 1257 | 201 | GGCUCUCUGGACACUCCCG | 1438 |
| 201 | CUUGUCUCCAGCCGGCCCC | 1258 | 201 | CUUGUCUCCAGCCGGCCCC | 1258 | 219 | GGGGCCGGCUGGAGACAAG | 1439 |
| 219 | CGGGAGGAGAGCCCUGCUG | 1259 | 219 | CGGGAGGAGAGCCCUGCUG | 1259 | 237 | CAGCAGGGCUCUCCUCCCG | 1440 |
| 237 | GCCCAGGCGCUGUUGACAG | 1260 | 237 | GCCCAGGCGCUGUUGACAG | 1260 | 255 | CUGUCAACAGCGCCUGGGC | 1441 |
| 255 | GCGGCGGAAAGCAGCGGUA | 1261 | 255 | GCGGCGGAAAGCAGCGGUA | 1261 | 273 | UACCGCUGCUUUCCGCCGC | 1442 |
| 273 | ACCCCACGCGCCCGCCGGG | 1262 | 273 | ACCCCACGCGCCCGCCGGG | 1262 | 291 | CCCGGCGGGCGCGUGGGGU | 1443 |
| 291 | GGGACGUCGGCGAGCGGCU | 1263 | 291 | GGGACGUCGGCGAGCGGCU | 1263 | 309 | AGCCGCUCGCCGACGUCCC | 1444 |
| 309 | UGCAGCAGCAAAGAACUUU | 1264 | 309 | UGCAGCAGCAAAGAACUUU | 1264 | 327 | AAAGUUCUUUGCUGCUGCA | 1445 |
| 327 | UCCCGGCGGGGAGGACCGG | 1265 | 327 | UCCCGGCGGGGAGGACCGG | 1265 | 345 | CCGGUCCUCCCCGCCGGGA | 1446 |
| 345 | GAGACAAGUGGCAGAGUCC | 1266 | 345 | GAGACAAGUGGCAGAGUCC | 1266 | 363 | GGACUCUGCCACUUGUCUC | 1447 |
| 363 | CCGGAGCGAACUUUUGCAA | 1267 | 363 | CCGGAGCGAACUUUUGCAA | 1267 | 381 | UUGCAAAAGUUCGCUCCGG | 1448 |
| 381 | AGCCUUUCCUGCGUCUUAG | 1268 | 381 | AGCCUUUCCUGCGUCUUAG | 1268 | 399 | CUAAGACGCAGGAAAGGCU | 1449 |
| 399 | GGCUUCUCCACGGCGGUAA | 1269 | 399 | GGCUUCUCCACGGCGGUAA | 1269 | 417 | UUACCGCCGUGGAGAAGCC | 1450 |
| 417 | AAGACCAGAAGGCGGCGGA | 1270 | 417 | AAGACCAGAAGGCGGCGGA | 1270 | 435 | UCCGCCGCCUUCUGGUCUU | 1451 |
| 435 | AGAGCCACGCAAGAGAAGA | 1271 | 435 | AGAGCCACGCAAGAGAAGA | 1271 | 453 | UCUUCUCUUGCGUGGCUCU | 1452 |
| 453 | AAGGACGUGCGCUCAGCUU | 1272 | 453 | AAGGACGUGCGCUCAGCUU | 1272 | 471 | AAGCUGAGCGCACGUCCUU | 1453 |
| 471 | UCGCUCGCACCGGUUGUUG | 1273 | 471 | UCGCUCGCACCGGUUGUUG | 1273 | 489 | CAACAACCGGUGCGAGCGA | 1454 |
| 489 | GAACUUGGGCGAGCGCGAG | 1274 | 489 | GAACUUGGGCGAGCGCGAG | 1274 | 507 | CUCGCGCUCGCCCAAGUUC | 1455 |
| 507 | GCCGCGGCUGCCGGGCGCC | 1275 | 507 | GCCGCGGCUGCCGGGCGCC | 1275 | 525 | GGCGCCCGGCAGCCGCGGC | 1456 |
| 525 | CCCCUCCCCCUAGCAGCGG | 1276 | 525 | CCCCUCCCCCUAGCAGCGG | 1276 | 543 | CCGCUGCUAGGGGGAGGGG | 1457 |
| 543 | GAGGAGGGGACAAGUCGUC | 1277 | 543 | GAGGAGGGGACAAGUCGUC | 1277 | 561 | GACGACUUGUCCCCUCCUC | 1458 |
| 561 | CGGAGUCCGGGCGGCCAAG | 1278 | 561 | CGGAGUCCGGGCGGCCAAG | 1278 | 579 | CUUGGCCGCCCGGACUCCG | 1459 |
| 579 | GACCCGCCGCCGGCCGGCC | 1279 | 579 | GACCCGGCGCCGGCCGGCC | 1279 | 597 | GGCCGGCCGGCGGCGGGUC | 1460 |
| 597 | CACUGCAGGGUCCGCACUG | 1280 | 597 | CACUGCAGGGUCCGCACUG | 1280 | 615 | CAGUGCGGACCCUGCAGUG | 1461 |
| 615 | GAUCCGCUCCGCGGGGAGA | 1281 | 615 | GAUCCGCUCCGCGGGGAGA | 1281 | 633 | UCUCCCCGCGGAGCGGAUC | 1462 |
| 633 | AGCCGCUGCUCUGGGAAGU | 1282 | 633 | AGCCGCUGCUCUGGGAAGU | 1282 | 651 | ACUUCCCAGAGCAGCGGCU | 1463 |
| 651 | UGAGUUCGCCUGCGGACUC | 1283 | 651 | UGAGUUCGCCUGCGGACUC | 1283 | 669 | GAGUCCGCAGGCGAACUCA | 1464 |
| 669 | CCGAGGAACCGCUGCGCCC | 1284 | 669 | CCGAGGAACCGCUGCGCCC | 1284 | 687 | GGGCGCAGCGGUUCCUCGG | 1465 |
| 687 | CGAAGAGCGCUCAGUGAGU | 1285 | 687 | CGAAGAGCGCUCAGUGAGU | 1285 | 705 | ACUCACUGAGCGCUCUUCG | 1466 |
| 705 | UGACCGCGACUUUUCAAAG | 1286 | 705 | UGACCGCGACUUUUCAAAG | 1286 | 723 | CUUUGAAAAGUCGCGGUCA | 1467 |
| 723 | GCCGGGUAGCGCGCGCGAG | 1287 | 723 | GCCGGGUAGCGCGCGCGAG | 1287 | 741 | CUCGCGCGCGCUACCCGGC | 1468 |
| 741 | GUCGACAAGUAAGAGUGCG | 1288 | 741 | GUCGACAAGUAAGAGUGCG | 1288 | 759 | CGCACUCUUACUUGUCGAC | 1469 |
| 759 | GGGAGGCAUCUUAAUUAAC | 1289 | 759 | GGGAGGCAUCUUAAUUAAC | 1289 | 777 | GUUAAUUAAGAUGCCUCCC | 1470 |
| 777 | CCCUGCGGUCCCUGGAGCG | 1290 | 777 | CCCUGCGCUCCCUGGAGCG | 1290 | 795 | CGCUCCAGGGAGCGCAGGG | 1471 |
| 795 | GAGCUGGUGAGGAGGGCGC | 1291 | 795 | GAGCUGGUGAGGAGGGCGC | 1291 | 813 | GCGCCCUCCUCACCAGCUC | 1472 |
| 813 | CAGCGGGGACGACAGCCAG | 1292 | 813 | CAGCGGGGACGACAGCCAG | 1292 | 831 | CUGGCUGUCGUCCCCGCUG | 1473 |
| 831 | GCGGGUGCGUGCGCUCUUA | 1293 | 831 | GCGGGUGCGUGCGCUCUUA | 1293 | 849 | UAAGAGCGCACGCACCCGC | 1474 |
| 849 | AGAGAAACUUUCCCUGUCA | 1294 | 849 | AGAGAAACUUUCCCUGUCA | 1294 | 867 | UGACAGGGAAAGUUUCUCU | 1475 |
| 867 | AAAGGCUCCGGGGGGCGCG | 1295 | 867 | AAAGGCUCCGGGGGGCGCG | 1295 | 885 | CGCGCCCCCCGGAGCCUUU | 1476 |
| 885 | GGGUGUCCCCCGCUUGCCA | 1296 | 885 | GGGUGUCCCCCGCUUGCCA | 1296 | 903 | UGGCAAGCGGGGGACACCC | 1477 |
| 903 | AGAGCCCUGUUGCGGCCCC | 1297 | 903 | AGAGCCCUGUUGCGGCCCC | 1297 | 921 | GGGGCCGCAACAGGGCUCU | 1478 |
| 921 | CGAAACUUGUGCGCGCACG | 1298 | 921 | CGAAACUUGUGCGCGCACG | 1298 | 939 | CGUGCGCGCACAAGUUUCG | 1479 |
| 939 | GCCAAACUAACCUCACGUG | 1299 | 939 | GCCAAACUAACCUCACGUG | 1299 | 957 | CACGUGAGGUUAGUUUGGC | 1480 |
| 957 | GAAGUGACGGACUGUUCUA | 1300 | 957 | GAAGUGACGGACUGUUCUA | 1300 | 975 | UAGAACAGUCCGUCACUUC | 1481 |
| 975 | AUGACUGCAAAGAUGGAAA | 1301 | 975 | AUGACUGCAAAGAUGGAAA | 1301 | 993 | UUUCCAUCUUUGCAGUCAU | 1482 |
| 993 | ACGACCUUCUAUGACGAUG | 1302 | 993 | ACGACCUUCUAUGACGAUG | 1302 | 1011 | CAUCGUCAUAGAAGGUCGU | 1483 |
| 1011 | GCCCUCAACGCCUCGUUCC | 1303 | 1011 | GCCCUCAACGCCUCGUUCC | 1303 | 1029 | GGAACGAGGCGUUGAGGGC | 1484 |
| 1029 | CUCCCGUCCGAGAGCGGAC | 1304 | 1029 | CUCCCGUCCGAGAGCGGAC | 1304 | 1047 | GUCCGCUCUCGGACGGGAG | 1485 |
| 1047 | CCUUAUGGCUACAGUAACC | 1305 | 1047 | CCUUAUGGCUACAGUAACC | 1305 | 1065 | GGUUACUGUAGCCAUAAGG | 1486 |
| 1065 | CCCAAGAUCCUGAAACAGA | 1306 | 1065 | CCCAAGAUCCUGAAACAGA | 1306 | 1083 | UCUGUUUCAGGAUCUUGGG | 1487 |
| 1083 | AGCAUGACCCUGAACCUGG | 1307 | 1083 | AGCAUGACCCUGAACCUGG | 1307 | 1101 | CCAGGUUCAGGGUCAUGCU | 1488 |
| 1101 | GCCGACCCAGUGGGGAGCC | 1308 | 1101 | GCCGACCCAGUGGGGAGCC | 1308 | 1119 | GGCUCCCCACUGGGUCGGC | 1489 |
| 1119 | CUGAAGCCGCACCUCCGCG | 1309 | 1119 | CUGAAGCCGCACCUCCGCG | 1309 | 1137 | CGCGGAGGUGCGGCUUCAG | 1490 |
| 1137 | GCCAAGAACUCGGACCUCC | 1310 | 1137 | GCCAAGAACUCGGACCUCC | 1310 | 1155 | GGAGGUCCGAGUUCUUGGC | 1491 |
| 1155 | CUCACCUCGCCCGACGUGG | 1311 | 1155 | CUCACCUCGCCCGACGUGG | 1311 | 1173 | CCACGUCGGGCGAGGUGAG | 1492 |
| 1173 | GGGCUGCUCAAGCUGGCGU | 1312 | 1173 | GGGCUGCUCAAGCUGGCGU | 1312 | 1191 | ACGCCAGCUUGAGCAGCCC | 1493 |
| 1191 | UCGCCCGAGCUGGAGCGCC | 1313 | 1191 | UCGCCCGAGCUGGAGCGCC | 1313 | 1209 | GGCGCUCCAGCUCGGGCGA | 1494 |
| 1209 | CUGAUAAUCCAGUCCAGCA | 1314 | 1209 | CUGAUAAUCCAGUCCAGCA | 1314 | 1227 | UGCUGGACUGGAUUAUCAG | 1495 |
| 1227 | AACGGGCACAUCACCACCA | 1315 | 1227 | AACGGGCACAUCACCACCA | 1315 | 1245 | UGGUGGUGAUGUGCCCGUU | 1496 |
| 1245 | ACGCCGACCCCCACCCAGU | 1316 | 1245 | AGGCCGACCCCCACCCAGU | 1316 | 1263 | ACUGGGUGGGGGUCGGCGU | 1497 |
| 1263 | UUCCUGUGCCCCAAGAACG | 1317 | 1263 | UUCCUGUGCCCCAAGAACG | 1317 | 1281 | CGUUCUUGGGGCACAGGAA | 1498 |
| 1281 | GUGACAGAUGAGCAGGAGG | 1318 | 1281 | GUGACAGAUGAGCAGGAGG | 1318 | 1299 | CCUCCUGCUCAUCUGUCAC | 1499 |
| 1299 | GGGUUCGCCGAGGGCUUCG | 1319 | 1299 | GGGUUCGCCGAGGGCUUCG | 1319 | 1317 | CGAAGCCCUCGGCGAACCC | 1500 |
| 1317 | GUGCGCGCCCUGGCCGAAC | 1320 | 1317 | GUGCGCGCCCUGGCCGAAC | 1320 | 1335 | GUUCGGCCAGGGCGCGCAC | 1501 |
| 1335 | CUGCACAGCCAGAAGACGC | 1321 | 1335 | CUGCACAGCCAGAACACGC | 1321 | 1353 | GCGUGUUCUGGCUGUGCAG | 1502 |
| 1353 | CUGCCCAGCGUCACGUCGG | 1322 | 1353 | CUGCCCAGCGUCACGUCGG | 1322 | 1371 | CCGACGUGACGCUGGGCAG | 1503 |
| 1371 | GCGGCGCAGCCGGUCAACG | 1323 | 1371 | GCGGCGCAGCCGGUCAACG | 1323 | 1389 | CGUUGACCGGCUGCGCCGC | 1504 |
| 1389 | GGGGCAGGCAUGGUGGCUC | 1324 | 1389 | GGGGCAGGCAUGGUGGCUC | 1324 | 1407 | GAGCCACCAUGCCUGCCCC | 1505 |
| 1407 | CCCGCGGUAGCCUCGGUGG | 1325 | 1407 | CCCGGGGUAGCCUGGGUGG | 1325 | 1425 | CCACCGAGGCUACCGCGGG | 1506 |
| 1425 | GCAGGGGGCAGCGGCAGCG | 1326 | 1425 | GCAGGGGGCAGCGGCAGCG | 1326 | 1443 | CGCUGCCGCUGCCCCCUGC | 1507 |
| 1443 | GGCGGCUUCAGCGCCAGCC | 1327 | 1443 | GGCGGCUUCAGCGCCAGCC | 1327 | 1461 | GGCUGGCGCUGAAGCCGCC | 1508 |
| 1461 | CUGCAGAGCGAGCCGCCGG | 1328 | 1461 | CUGCACAGCGAGCCGCCGG | 1328 | 1479 | CCGGCGGCUCGCUGUGCAG | 1509 |
| 1479 | GUCUACGCAAAGCUCAGCA | 1329 | 1479 | GUCUACGCAAACCUCAGCA | 1329 | 1497 | UGCUGAGGUUUGCGUAGAC | 1510 |
| 1497 | AACUUCAACCCAGGCGCGC | 1330 | 1497 | AACUUCAACCCAGGCGCGC | 1330 | 1515 | GCGCGCCUGGGUUGAAGUU | 1511 |
| 1515 | CUGAGCAGCGGCGGCGGGG | 1331 | 1515 | CUGAGCAGCGGCGGCGGGG | 1331 | 1533 | CCCCGCCGCGGCUGCUCAG | 1512 |
| 1533 | GCGCCCUCCUACGGCGCGG | 1332 | 1533 | GCGCCCUCCUACGGCGCGG | 1332 | 1551 | CCGCGCCGUAGGAGGGCGC | 1513 |
| 1551 | GCCGGCCUGGCCUUUCCCG | 1333 | 1551 | GCCGGCCUGGCCUUUCCCG | 1333 | 1569 | CGGGA~AGGCCAGGCCGGC | 1514 |
| 1569 | GCGCAACCCCAGCAGCAGC | 1334 | 1569 | GCGCAACCCCAGCAGCAGC | 1334 | 1587 | GCUGCUGCUGGGGUUGCGC | 1515 |
| 1587 | CAGCAGCCGCCGCACCACC | 1335 | 1587 | CAGCAGCCGCCGCACCACC | 1335 | 1605 | GGUGGUGCGGCGGCUGCUG | 1516 |
| 1605 | CUGCCCGAGCAGAUGCCCG | 1336 | 1605 | CUGCCCCAGCAGAUGCCCG | 1336 | 1623 | CGGGCAUCUGCUGGGGCAG | 1517 |
| 1623 | GUGCAGCACCCGCGGCUGC | 1337 | 1623 | GUGCAGCACCCGCGGCUGC | 1337 | 1641 | GCAGCCGCGGGUGCUGCAC | 1518 |
| 1641 | CAGGCCCUGAAGGAGGAGC | 1338 | 1641 | CAGGCCCUGAAGGAGGAGC | 1338 | 1659 | GCUCCUCCUUCAGGGCCUG | 1519 |
| 1659 | CCUCAGACAGUGCCCGAGA | 1339 | 1659 | CCUCAGACAGUGCCCGAGA | 1339 | 1677 | UCUCGGGCAGUGUCUGAGG | 1520 |
| 1677 | AUGCCCGGCGAGACACCGC | 1340 | 1677 | AUGCCCGGCGAGACACCGC | 1340 | 1695 | GCGGUGUCUCGCCGGGCAU | 1521 |
| 1695 | CCCCUGUGCCCCAUCGACA | 1341 | 1695 | CCCCUGUCCCCCAUGGACA | 1341 | 1713 | UGUCGAUGGGGGACAGGGG | 1522 |
| 1713 | AUGGAGUCCCAGGAGCGGA | 1342 | 1713 | AUGGAGUCCCAGGAGCGGA | 1342 | 1731 | UCCGCUCCUGGGACUCCAU | 1523 |
| 1731 | AUCAAGGCGGAGAGGAAGC | 1343 | 1731 | AUCAAGGCGGAGAGGAAGC | 1343 | 1749 | GCUUCCUCUCCGCCUUGAU | 1524 |
| 1749 | CGCAUGAGGAACCGCAUCG | 1344 | 1749 | CGCAUGAGGAACCGCAUCG | 1344 | 1767 | CGAUGGGGUUCCUCAUGCG | 1525 |
| 1767 | GCUGCGUCCAAGUGCCGAA | 1345 | 1767 | GCUGCCUCCAAGUGCCGAA | 1345 | 1785 | UUCGGCACUUGGAGGCAGC | 1526 |
| 1785 | AAAAGGAAGCUGGAGAGAA | 1346 | 1785 | AAAAGGAAGCUGGAGAGAA | 1346 | 1803 | UUCUCUCCAGCUUCCUUUU | 1527 |
| 1803 | AUCGCCCGGCUGGAGGAAA | 1347 | 1803 | AUCGCCCGGCUGGAGGAAA | 1347 | 1821 | UUUCCUGCAGCCGGGCGAU | 1528 |
| 1821 | AAAGUGAAAACCUUGAAAG | 1348 | 1821 | AAAGUGAAAACCUUGAAAG | 1348 | 1839 | CUUUCAAGGUUUUCACUUU | 1529 |
| 1839 | GCUCAGAACUCGGAGCUGG | 1349 | 1839 | GCUCAGAACUCGGAGCUGG | 1349 | 1857 | CCAGCUCCGAGUUCUGAGC | 1530 |
| 1857 | GCGUCCACGGCCAACAUGC | 1350 | 1857 | GCGUCCACGGCCAACAUGC | 1350 | 1875 | GCAUGUUGGCCGUGGACGC | 1531 |
| 1875 | CUGAGGGAACAGGUGGCAC | 1351 | 1875 | CUCAGGGAACAGGUGGCAC | 1351 | 1893 | GUGCCACCUGUUCCCUGAG | 1532 |
| 1893 | CAGCUUAAACAGAAAGUCA | 1352 | 1893 | CAGCUUAAACAGAAAGUCA | 1352 | 1911 | UGACUUUCUGUUUAAGCUG | 1533 |
| 1911 | AUGAACCACGUUAACAGUG | 1353 | 1911 | AUGAACCACGUUAACAGUG | 1353 | 1929 | CACUGUUAACGUGGUUCAU | 1534 |
| 1929 | GGGUGCCAACUCAUGCUAA | 1354 | 1929 | GGGUGCCAACUCAUGCUAA | 1354 | 1947 | UUAGCAUGAGUUGGCACCC | 1535 |
| 1947 | ACGCAGCAGUUGCAAACAU | 1355 | 1947 | AGGCAGCAGUUGCAAACAU | 1355 | 1965 | AUGUUUGCAACUGCUGCGU | 1536 |
| 1965 | UUUUGAAGAGAGACCGUCG | 1356 | 1965 | UUUUGAAGAGAGACCGUCG | 1356 | 1983 | CGACGGUCUCUCUUCAAAA | 1537 |
| 1983 | GGGGGCUGAGGGGCAACGA | 1357 | 1983 | GGGGGCUGAGGGGGAACGA | 1357 | 2001 | UCGUUGCCCGUCAGCCCCC | 1538 |
| 2001 | AAGAAAAAAAAUAACACAG | 1358 | 2001 | AAGAAAAAAAAUAACACAG | 1358 | 2019 | CUGUGUUAUUUUUUUUCUU | 1539 |
| 2019 | GAGAGACAGACUUGAGAAC | 1359 | 2019 | GAGAGACAGACUUGAGAAC | 1359 | 2037 | GUUCUCAAGUCUGUCUCUC | 1540 |
| 2037 | CUUGACAAGUUGCGACGGA | 1360 | 2037 | CUUGACAAGUUGCGACGGA | 1360 | 2055 | UCCGUCGCAACUUGUCAAG | 1541 |
| 2055 | AGAGAAAAAAGAAGUGUCC | 1361 | 2055 | AGAGAAAAAAGAAGUGUCC | 1361 | 2073 | GGACAGUUCUUUUUUCUCU | 1542 |
| 2073 | CGAGAACUAAAGCCAAGGG | 1362 | 2073 | GGAGAACUAAAGCCAAGGG | 1362 | 2091 | CCCUUGGCUUUAGUUCUCG | 1543 |
| 2091 | GUAUCCAAGUUGGACUGGG | 1363 | 2091 | GUAUCCAAGUUGGACUGGG | 1363 | 2109 | CCCAGUCCAACUUGGAUAC | 1544 |
| 2109 | GUUCGGUCUGACGGCGCCC | 1364 | 2109 | GUUGGGUCUGACGGCGCCC | 1364 | 2127 | GGGCGCCGUCAGACCGAAC | 1545 |
| 2127 | CCCAGUGUGCACGAGUGGG | 1365 | 2127 | CCCAGUGUGCACGAGUGGG | 1365 | 2145 | CCCACUCGUGCACACUGGG | 1546 |
| 2145 | GAAGGACUUGGUCGCGCCC | 1366 | 2145 | GAAGGACUUGGUCGCGCCC | 1366 | 2163 | GGGCGCGACCAAGUCCUUC | 1547 |
| 2163 | CUCCCUUGGCGUGGAGCCA | 1367 | 2163 | CUCCCUUGGCGUGGAGCCA | 1367 | 2181 | UGGCUCCACGCCAAGGGAG | 1548 |
| 2181 | AGGGAGCGGCCGCCUGCGG | 1368 | 2181 | AGGGAGCGGCCGCCUGCGG | 1368 | 2199 | CCGCAGGCGGCCGCUCCCU | 1549 |
| 2199 | GGCUGCCCCGCUUUGCGGA | 1369 | 2199 | GGCUGCCCCGCUUUGCGGA | 1369 | 2217 | UCCGCAAAGCGGGGCAGCC | 1550 |
| 2217 | ACGGGCUGUCCCCGCGCGA | 1370 | 2217 | ACGGGCUGUCCCCGCGCGA | 1370 | 2235 | UCGCGCGGGGACAGCCCGU | 1551 |
| 2235 | AACGGAACGUUGGACUUUC | 1371 | 2235 | AACGGAACGUUGGAGUUUC | 1371 | 2253 | GAAAGUCCAACGUUCCGUU | 1552 |
| 2253 | CGUUAACAUUGACCAAGAA | 1372 | 2253 | CGUUAACAUUGACCAAGAA | 1372 | 2271 | UUCUUGGUCAAUGUUAACG | 1553 |
| 2271 | ACUGCAUGGACCUAACAUU | 1373 | 2271 | ACUGCAUGGACGUAACAUU | 1373 | 2289 | AAUGUUAGGUCCAUGCAGU | 1554 |
| 2289 | UCGAUCUCAUUCAGUAUUA | 1374 | 2289 | UCGAUCUCAUUCAGUAUUA | 1374 | 2307 | UAAUACUGAAUGAGAUCGA | 1555 |
| 2307 | AAAGGGGGGAGGGGGAGGG | 1375 | 2307 | AAAGGGGGGAGGGGGAGGG | 1375 | 2325 | CCCUCGCCCUCCCCCCUUU | 1556 |
| 2325 | GGGUUACAAACUGCAAUAG | 1376 | 2325 | GGGUUACAAACUGCAAUAG | 1376 | 2343 | CUAUUGCAGUUUGUAACCC | 1557 |
| 2343 | GAGACUGUAGAUUGCUUCU | 1377 | 2343 | GAGACUGUAGAUUGCUUCU | 1377 | 2361 | AGAAGCAAUCUACAGUCUC | 1558 |
| 2361 | UGUAGUACUCCUUAAGAAC | 1378 | 2361 | UGUAGUACUCCUUAAGAAC | 1378 | 2379 | GUUCUUAAGGAGUACUACA | 1559 |
| 2379 | CACAAAGCGGGGGGAGGGU | 1379 | 2379 | GACAAAGCGGGGGGAGGGU | 1379 | 2397 | ACCCUCCCCCCGCUUUGUG | 1560 |
| 2397 | UUGGGGAGGGGCGGCAGGA | 1380 | 2397 | UUGGGGAGGGGCGGGAGGA | 1380 | 2415 | UCCUGCCGCCCGUCCCCAA | 1561 |
| 2415 | AGGGAGGUUUGUGAGAGCG | 1381 | 2415 | AGGGAGGUUUGUGAGAGCG | 1381 | 2433 | CGCUCUCAGAAACCUCCCU | 1562 |
| 2433 | GAGGCUGAGCCUACAGAUG | 1382 | 2433 | GAGGCUGAGCCUACAGAUG | 1382 | 2451 | CAUCUGUAGGCUCAGCCUC | 1563 |
| 2451 | GAACUCUUUCUGGCGUGCU | 1383 | 2451 | GAACUCUUUCUGGCGUGCU | 1383 | 2469 | AGCAGGCCAGAAAGAGUUC | 1564 |
| 2469 | UUUCGUUAACUGUGUAUGU | 1384 | 2469 | UUUCGUUAACUGUGUAUGU | 1384 | 2487 | ACAUACACAGUUAACGAAA | 1565 |
| 2487 | UACAUAUAUAUAUUUUUUA | 1385 | 2487 | UACAUAUAUAUAUUUUUUA | 1385 | 2505 | UAAAAAAUAUAUAUAUGUA | 1566 |
| 2505 | AAUUUGAUUAAAGCUGAUU | 1386 | 2505 | AAUUUGAUUAAAGCUGAUU | 1386 | 2523 | AAUCAGCUUUAAUCAAAUU | 1567 |
| 2523 | UACUGUCAAUAAACAGCUU | 1387 | 2523 | UACUGUCAAUAAACAGCUU | 1387 | 2541 | AAGCUGUUUAUUGACAGUA | 1568 |
| 2541 | UCAUGCCUUUGUAAGUUAU | 1388 | 2541 | UCAUGCCUUUGUAAGUUAU | 1388 | 2559 | AUAACUUACAAAGGCAUGA | 1569 |
| 2559 | UUUCUUGUUUGUUUGUUUG | 1389 | 2559 | UUUCUUGUUUGUUUGUUUG | 1389 | 2577 | CAAACAAACAAACAAGAAA | 1570 |
| 2577 | GGGUAUCCUGCCCAGUGUU | 1390 | 2577 | GGGUAUCCUGCCCAGUGUU | 1390 | 2595 | AACACUGGGCAGGAUACCC | 1571 |
| 2595 | UGUUUGUAAAUAAGAGAUU | 1391 | 2595 | UGUUUGUAAAUAAGAGAUU | 1391 | 2613 | AAUCUCUUAUUUACAAACA | 1572 |
| 2613 | UUGGAGCACUCUGAGUUUA | 1392 | 2613 | UUGGAGCACUCUGAGUUUA | 1392 | 2631 | UAAACUCAGAGUGCUCCAA | 1573 |
| 2631 | ACCAUUUGUAAUAAAGUAU | 1393 | 2631 | ACCAUUUGUAAUAAAGUAU | 1393 | 2649 | AUACUUUAUUACAAAUGGU | 1574 |
| 2649 | UAUAAUUUUUUUAUGUUUU | 1394 | 2649 | UAUAAUUUUUUUAUGUUUU | 1394 | 2667 | AAAACAUAAAAAAAUUAUA | 1575 |
| 2667 | UGUUUCUGAAAAUUCCAGA | 1395 | 2667 | UGUUUCUGAAAAUUCCAGA | 1395 | 2685 | UGUGGAAUUUUCAGAAACA | 1576 |
| 2685 | AAAGGAUAUUUAAGAAAAU | 1396 | 2685 | AAAGGAUAUUUAAGAAAAU | 1396 | 2703 | AUUUUCUUAAAUAUCCUUU | 1577 |
| 2703 | UACAAUAAACUAUUGGAAA | 1397 | 2703 | UACAAUAAACUAUUGGAAA | 1397 | 2721 | UUUCCAAUAGUUUAUUGUA | 1578 |
| 2721 | AGUACUCCCCUAACCUCUU | 1398 | 2721 | AGUACUCCCCUAACCUCUU | 1398 | 2739 | AAGAGGUUAGGGGAGUACU | 1579 |
| 2739 | UUUCUGCAUCAUCUGUAGA | 1399 | 2739 | UUUCUGCAUGAUCUGUAGA | 1399 | 2757 | UCUACAGAUGAUGCAGAAA | 1580 |
| 2757 | AUCCUAGUCUAUCUAGGUG | 1400 | 2757 | AUCCUAGUGUAUCUAGGUG | 1400 | 2775 | CACCUAGAUAGACUAGGAU | 1581 |
| 2775 | GGAGUUGAAAGAGUUAAGA | 1401 | 2775 | GGAGUUGAAAGAGUUAAGA | 1401 | 2793 | UCUUAACUCUUUCAACUCC | 1582 |
| 2793 | AAUGCUCGAUAAAAUCACU | 1402 | 2793 | AAUGCUCGAUAAAAUCACU | 1402 | 2811 | AGUGAUUUUAUCGAGCAUU | 1583 |
| 2811 | UCUCAGUGCUUCUUACUAU | 1403 | 2811 | UCUCAGUGCUUCUUACUAU | 1403 | 2829 | AUAGUAAGAAGCACUGAGA | 1584 |
| 2829 | UUAAGCAGUAAAAACUGUU | 1404 | 2829 | UUAAGCAGUAAAAACUGUU | 1404 | 2847 | AACAGUUUUUACUGCUUAA | 1585 |
| 2847 | UCUCUAUUAGACUUAGAAA | 1405 | 2847 | UCUCUAUUAGACUUAGAAA | 1405 | 2865 | UUUCUAAGUCUAAUAGAGA | 1586 |
| 2865 | AUAAAUGUACCUGAUGUAC | 1406 | 2865 | AUAAAUGUACCUGAUGUAC | 1406 | 2883 | GUACAUCAGGUACAUUUAU | 1587 |
| 2883 | CCUGAUGCUAUGUCAGGCU | 1407 | 2883 | CGUGAUGCUAUGUCAGGCU | 1407 | 2901 | AGCCUGACAUAGCAUCAGG | 1588 |
| 2901 | UUCAUACUCCACGCUCCCC | 1408 | 2901 | UUCAUACUCCACGCUCCCC | 1408 | 2919 | GGGGAGCGUGGAGUAUGAA | 1589 |
| 2919 | CCAGCGUAUCUAUAUGGAA | 1409 | 2919 | CCAGCGUAUCUAUAUGGAA | 1409 | 2937 | UUCCAUAUAGAUACGCUGG | 1590 |
| 2937 | AUUGCUUACCAAAGGCUAG | 1410 | 2937 | AUUGCUUACCAAAGGCUAG | 1410 | 2955 | CUAGCCUUUGGUAAGCAAU | 1591 |
| 2955 | GUGCGAUGUUUCAGGAGGC | 1411 | 2955 | GUGCGAUGUUUCAGGAGGC | 1411 | 2973 | GCCUCCUGAAACAUCGCAC | 1592 |
| 2973 | CUGGAGGAAGGGGGGUUGC | 1412 | 2973 | CUGGAGGAAGGGGGGUUGC | 1412 | 2991 | GCAACCCCCCUUCCUCCAG | 1593 |
| 2991 | CAGUGGAGAGGGACAGCCC | 1413 | 2991 | CAGUGGAGAGGGACAGCCC | 1413 | 3009 | GGGCUGUCCCUCUCCACUG | 1594 |
| 3009 | CACUGAGAAGUCAAACAUU | 1414 | 3009 | CACUGAGAAGUCAAACAUU | 1414 | 3027 | AAUGUUUGACUUCUCAGUG | 1595 |
| 3027 | UUCAAAGUUUGGAUUGCAU | 1415 | 3027 | UUCAAAGUUUGGAUUGCAU | 1415 | 3045 | AUGCAAUCCAAACUUUGAA | 1596 |
| 3045 | UCAAGUGGCAUGUGCUGUG | 1416 | 3045 | UCAAGUGGCAUGUGCUGUG | 1416 | 3063 | CACAGCACAUGCCACUUGA | 1597 |
| 3063 | GACCAUUUAUAAUGUUAGA | 1417 | 3063 | GACCAUUUAUAAUGUUAGA | 1417 | 3081 | UCUAACAUUAUAAAUGGUC | 1598 |
| 3081 | AAAUUUUACAAUAGGUGCU | 1418 | 3081 | AAAUUUUACAAUAGGUGCU | 1418 | 3099 | AGCACCUAUUGUAAAAUUU | 1599 |
| 3099 | UUAUUCUCAAAGCAGGAAU | 1419 | 3099 | UUAUUCUCAAAGCAGGAAU | 1419 | 3117 | AUUCCUGCUUUGAGAAUAA | 1600 |
| 3117 | UUGGUGGCAGAUUUUACAA | 1420 | 3117 | UUGGUGGCAGAUUUUACAA | 1420 | 3135 | UUGUAAAAUCUGCCACCAA | 1601 |
| 3135 | AAAGAUGUAUCCUUCCAAU | 1421 | 3135 | AAAGAUGUAUCCUUCCAAU | 1421 | 3153 | AUUGGAAGGAUACAUCUUU | 1602 |
| 3153 | UUUGGAAUGUUCUCUUUGA | 1422 | 3153 | UUUGGAAUCUUCUCUUUGA | 1422 | 3171 | UCAAAGAGAAGAUUCCAAA | 1603 |
| 3171 | ACAAUUCCUAGAUAAAAAG | 1423 | 3171 | ACAAUUGCUAGAUAAAAAG | 1423 | 3189 | CUUUUUAUCUAGGAAUUGU | 1604 |
| 3189 | GAUGGCCUUUGUCUUAUGA | 1424 | 3189 | GAUGGCCUUUGUCUUAUGA | 1424 | 3207 | UCAUAAGACAAAGGCCAUC | 1605 |
| 3207 | AAUAUUUAUAACAGCAUUC | 1425 | 3207 | AAUAUUUAUAACAGCAUUC | 1425 | 3225 | GAAUGCUGUUAUAAAUAUU | 1606 |
| 3225 | CUGUCACAAUAAAUGUAUU | 1426 | 3225 | CUGUCACAAUAAAUGUAUU | 1426 | 3243 | AAUACAUUUAUUGUGACAG | 1607 |
| 3234 | UAAAUGUAUUCAAAUACCA | 1427 | 3234 | UAAAUGUAUUCAAAUACCA | 1427 | 3252 | UGGUAUUUGAAUACAUUUA | 1608 |
| The 3′-ends of the Upper sequence and the Lower sequence of the siNA construct can include an overhang sequence, for example about 1, 2, 3, or 4 nucleotides in length, preferably 2 nucleotides in length, wherein the overhanging sequence of the lower sequence is optionally complementary to a portion of the target sequence. The upper sequence is also referred to as the sense strand, whereas the lower sequence is also referred to as the antisense strand. The upper and lower sequences in the | | | | | | | | |
| # Table can further comprise a chemical modification having Formulae I-VII or any combination thereof. | | | | | | | | |

[0362] TABLE III

MAP Kinase Synthetic Modified siNA constructs

| | | | | | |
|---|---|---|---|---|---|
| Target | | Seq | | | Seq |
| Pos | Target | ID | Aliases | Sequence | ID |

MAPK1/ERK2

| | | | | | |
|---|---|---|---|---|---|
| 3302 | ACCAGACCUACUGCCAGAGAACC | 1113 | MAPK1:424U21 siRNA sense | CAGACCUACUGCCAGAGAATT | 1129 |
| 3852 | AUCACACAGGGUUCCUGACAGAA | 1114 | MAPK1:778U21 siRNA sense | CACACAGGGUUCCUGACAGTT | 1130 |
| 3892 | UUGGCUCUAGUCACUGGCAUGUC | 1115 | MAPK1:1718U21 siRNA sense | GGCUCUAGUCACUGGCAUCTT | 1131 |
| 3946 | ACUGUGGAGUUGACUCGGUGUUC | 1116 | MAPK1:2525U21 siRNA sense | UGUGGAGUUGACUCGGUGUTT | 1132 |
| 3302 | ACCAGACCUACUGCCAGAGAACC | 1113 | MAPK1:442L21 siRNA | UUCUCUGGCAGUAGGUCUGTT | 1133 |
| | | | (424C) antisense | | |
| 3852 | AUCACACAGGGUUCCUGACAGAA | 1114 | MAPK1:796L21 siRNA | CUGUCAGGAACCCUGUGUGTT | 1134 |
| | | | (778C) antisense | | |
| 3892 | UUGGCUCUAGUCACUGGCAUCUC | 1115 | MAPK1:1736L21 siRNA | GAUGCCAGUGACUAGAGCCTT | 1135 |
| | | | (1718C) antisense | | |
| 3946 | ACUGUGGAGUUGACUCGGUGUUC | 1116 | MAPK1:2543L21 siRNA | ACACCGAGUCAACUCCACATT | 1136 |
| | | | (2525C) antisense | | |
| 3302 | ACCAGACCUACUGCCAGAGAACC | 1113 | MAPK1:424U21 siRNA | B cAGAccuAcuGccAGAGAATT B | 1137 |
| | | | stab04 sense RPI 30817 | | |
| 3852 | AUCACACAGGGUUCCUGACAGAA | 1114 | MAPK1:778U21 siRNA | B cAcACAGGGuuccuGAcAGTT B | 1138 |
| | | | stab04 sense RPI 30818 | | |
| 3892 | UUGGCUCUAGUCACUGGCAUCUC | 1115 | MAPK1:1718U21 siRNA | B GGcucuAGucAcuGGcAucTT B | 1139 |
| | | | stab04 sense RPI 30819 | | |
| 3946 | ACUGUGGAGUUGACUCGGUGUUC | 1116 | MAPK1 :2525U21 siRNA | B UGuGGAGuuGAcucGGuGuTT B | 1140 |
| | | | stab04 sense RPI 30820 | | |
| 3302 | ACCAGACCUACUGCCAGAGAACC | 1113 | MAPK1:442L21 siRNA | uucucuGGcAGuAGGucuGTsT | 1141 |
| | | | (424C) stab05 antisense | | |
| | | | RPI 30821 | | |
| 3852 | AUCACACAGGGUUCCUGACAGAA | 1114 | MAPK1:796L21 siRNA | cuGucAGGAAcccuGuGuGTsT | 1142 |
| | | | (778C) stab05 antisense | | |
| | | | RPI 30822 | | |
| 3892 | UUGGCUCUAGUCACUGGCAUCUC | 1115 | MAPK1:1736L21 siRNA | GAuGccAGuGAcuAGAGccTsT | 1143 |
| | | | (1718C) stab05 antisense | | |
| | | | RPI 30823 | | |
| 3946 | ACUGUGGAGUUGACUCGGUGUUC | 1116 | MAPK1:2543L21 siRNA | AcAccGAGucAAcuccAcATsT | 1144 |
| | | | (2525C) stab05 antisense | | |
| | | | RH 30824 | | |
| 3302 | ACCAGACCUACUGCCAGAGAACC | 1113 | MAPK1:424U21 siRNA | B cAGAccuAcuGccAGAGAATT B | 1145 |
| | | | stab07 sense | | |
| 3852 | AUCACACAGGGUUCCUGACAGAA | 1114 | MAPK1:778U21 siRNA | B cAcAcAGGGuuccuGAcAGTT B | 1146 |
| | | | stab07 sense | | |
| 3892 | UUGGCUCUAGUCACUGGCAUCUC | 1115 | MAPK1:1718U21 siRNA | B GGcucuAGucAcuGGcAucTT B | 1147 |
| | | | stab07 sense | | |
| 3946 | ACUGUGGAGUUGACUCGGUGUUC | 1116 | MAPK1:2525U21 siRNA | B uGuGGAGuuGAcucGGuGuTT B | 1148 |
| | | | stab07 sense | | |
| 3302 | ACCAGACCUACUGCCAGAGAACC | 1113 | MAPK1:442L21 siRNA | uucucuGGcAGuAGGucuGTsT | 1149 |
| | | | (424C) stab11 antisense | | |
| 3852 | AUCACACAGGGUUCCUGACAGAA | 1114 | MAPK1:796L21 siRNA | cuGucAGGAAcccuGuGuGTsT | 1150 |
| | | | (778C) stab11 antisense | | |
| 3892 | UUGGCUCUAGUCACUGGCAUCUC | 1115 | MAPK1:1736L21 siRNA | GAuGccAGuGAcuAGAGccTsT | 1151 |
| | | | (1718C) stab11 antisense | | |
| 3946 | ACUGUGGAGUUGACUCGGUGUUC | 1116 | MAPK1:2543L21 siRNA | AcAccGAGucAAcuccAcATsT | 1152 |
| | | | (2525C) stab11 antisense | | |

MAPK3/ERK1

| | | | | | |
|---|---|---|---|---|---|
| 283 | CCUUCGAACAUCAGACCUACUGC | 1117 | MAPK3:285U21 siRNA sense | UUCGAACAUCAGACCUACUTT | 1153 |
| 709 | UGAACUCCAAGGGCUAUACCAAG | 1118 | MAPK3:711U21 siRNA sense | AACUCCAAGGGCUAUACCATT | 1154 |
| 718 | AGGGCUAUACCAAGUCCAUCGAC | 1119 | MAPK3:720U21 siRNA sense | GGCUAUACCAAGUCCAUCGTT | 1155 |
| 1778 | UUCUGUGUGUGGUGAGCAGAAGU | 1120 | MAPK3:1780U21 siRNA sense | CUGUGUGUGGUGAGCAGAATT | 1156 |
| 283 | CCUUCGAACAUCAGACCUACUGC | 1117 | MAPK3:303L21 siRNA (285C) | AGUAGGUCUGAUGUUCGAATT | 1157 |
| | | | antisense | | |
| 709 | UGAACUCCAAGGGCUAUACCAAG | 1118 | MAPK3:729L21 siRNA (711C) | UGGUAUAGCCCUUGGAGUUTT | 1158 |
| | | | antisense | | |
| 718 | AGGGCUAUACCAAGUCCAUCGAC | 1119 | MAPK3:738L21 siRNA (720C) | CGAUGGACUUGGUAUAGCCTT | 1159 |
| | | | antisense | | |
| 1778 | UUCUGUGUGUGGUGAGCAGAAGU | 1120 | MAPK3:1798L21 siRNA | UUCUGCUCACCACACACAGTT | 1160 |
| | | | (1780C) antisense | | |
| 283 | CCUUCGAACAUCAGACCUACUGC | 1117 | MAPK3:285U21 siRNA | B uucGAAcAucAGAccuAcuTT B | 1161 |
| | | | stab04 sense | | |
| 709 | UGAACUCCAAGGGCUAUACCAAG | 1118 | MAPK3:711U21 siRNA | B AAcuccAAGGGcuAuAccATT B | 1162 |
| | | | stab04 sense | | |
| 718 | AGGGCUAUACCAAGUCCAUCGAC | 1119 | MAPK3:720U21 siRNA | B GGcuAuAccAAGuccAucGTT B | 1163 |
| | | | stab04 sense | | |
| 1778 | UUCUGUGUGUGGUGAGCAGAAGU | 1120 | MAPK3:1780U21 siRNA | B cuGuGuGuGGuGAGcAGAATT B | 1164 |
| | | | stab04 sense | | |
| 283 | CCUUCGAACAUCAGACCUACUGC | 1117 | MAPK3:303L21 siRNA | AGuAGGUcuGAuGuucGAATsT | 1165 |
| | | | (285C) stab05 antisense | | |
| 709 | UGAACUCCAAGGGCUAUACCAAG | 1118 | MAPK3:729L21 siRNA | uGGuAUAGcccuuGGAGuuTsT | 1166 |
| | | | (711C) stab05 antisense | | |
| 718 | AGGGCUAUACCAAGUCCAUCGAC | 1119 | MAPK3:738L21 siRNA | cGAuGGAcuuGGuAuAGccTsT | 1167 |
| | | | (720C) stab05 antisense | | |
| 1778 | UUCUGUGUGUGGUGAGCAGAAGU | 1120 | MAPK3:1798L21 siRNA | uucuGcucAccAcAcAcAGTsT | 1168 |
| | | | (1780C) stab05 antisense | | |
| 283 | CCUUCGAACAUCAGACCUACUGC | 1117 | MAPK3:285U21 siRNA | B uucGAAcAucAGAccuAcuTT B | 1169 |
| | | | stab07 sense | | |
| 709 | UGAACUCCAAGGGCUAUACCAAG | 1118 | MAPK3:711U21 siRNA | B AAcuccAAGGGcuAuAccATT B | 1170 |
| | | | stab07 sense | | |
| 718 | AGGGCUAUACCAAGUCCAUCGAC | 1119 | MAPK3:720U21 siRNA | B GGcuAuAccAAGuccAucGTT B | 1171 |
| | | | stab07 sense | | |
| 1778 | UUCUGUGUGUGGUGAGCAGAAGU | 1120 | MAPK3:1780U21 siRNA | B cuGuGuGuGGuGAGcAGAATT B | 1172 |
| | | | stab07 sense | | |
| 283 | CCUUCGAACAUCAGACCUACUGC | 1117 | MAPK3:303L21 siRNA | AGuAGGucuGAuGuucGAATsT | 1173 |
| | | | (285C) stab11 antisense | | |
| 709 | UGAACUCCAAGGGCUAUACCAAG | 1118 | MAPK3:729L21 siRNA | uGGuAuAGcccuuGGAGuuTsT | 1174 |
| | | | (711C) stab11 antisense | | |
| 718 | AGGGCUAUACCAAGUCCAUCGAC | 1119 | MAPK3:738L21 siRNA | cGAuGGAcuuGGuAuAGccTsT | 1175 |
| | | | (720C) stab11 antisense | | |
| 1778 | UUCUGUGUGUGGUGAGCAGAAGU | 1120 | MAPK3:1798L21 siRNA | uucuGcucAccAcAcAcAGTsT | 1176 |
| | | | (1780C) stab11 antisense | | |

| | | | | | | |
|---|---|---|---|---|---|---|
| Target | | Seq | | | | Seq |
| Pos | Target | ID | RPI# | Aliases | Sequence | ID |

MAPK8/JNK1

| | | | | | | |
|---|---|---|---|---|---|---|
| 733 | AACAGCUUGGAACACCAUGUCCU | 1121 | 31517 | MAPK8:735U21 siRNA sense | CAGCUUGGAACACCAUGUCTT | 1177 |
| 853 | UUUUCCCAGCUGACUCAGAACAC | 1122 | 31518 | MAPK8:855U21 siRNA sense | UUCCCAGCUGACUCAGAACTT | 1178 |
| 1224 | CAAUGUCAACAGAUCCGACUUUG | 1123 | 31519 | MAPK8:1226U21 siRNA sense | AUGUCAACAGAUCCGACUUTT | 1179 |
| 1242 | CUUUGGCCUCUGAUACAGACAGC | 1124 | 31520 | MAPK8:1244U21 siRNA sense | UUGGCCUCUGAUACAGACATT | 1180 |
| 733 | AACAGCUUGGAACACCAUGUCCU | 1121 | 31521 | MAPK8:753L21 siRNA | GACAUGGUGUUCCAAGCUGTT | 1181 |
| | | | | (735C) antisense | | |
| 853 | UUUUCCCAGCUGACUCAGAACAC | 1122 | 31522 | MAPK8:873L21 siRNA | GUUCUGAGUCAGCUGGGAATT | 1182 |
| | | | | (855C) antisense | | |
| 1224 | CAAUGUCAACAGAUCCGACUUUG | 1123 | 31523 | MAPK8:1244L21 siRNA | AAGUCGGAUCUGUUGACAUTT | 1183 |
| | | | | (1226C) antisense | | |
| 1242 | CUUUGGCCUCUGAUAGAGACAGC | 1124 | 31524 | MAPK8:1262L21 siRNA | UGUCUGUAUCAGAGGCCAATT | 1184 |
| | | | | (1244C) antisense | | |
| 733 | AACAGCUUGGAACACCAUGUCCU | 1121 | | MAPK8:735U21 siRNA | B cAGcuuGGAAcAccAuGucTT B | 1185 |
| | | | | stab4 sense | | |
| 853 | UUUUCCCAGCUGACUCAGAACAC | 1122 | | MAPK8:855U21 siRNA | B uucccAGcuGAcucAGAAcTT B | 1186 |
| | | | | stab4 sense | | |
| 1224 | CAAUGUCAACAGAUCCGACUUUG | 1123 | | MAPK8:1226U21 siRNA | B AuGucAAcAGAuccGAcuuTT B | 1187 |
| | | | | stab4 sense | | |
| 1242 | CUUUGGCCUCUGAUACAGACAGC | 1124 | | MAPK8:1244U21 siRNA | B uuGGccucuGAuAcAGAcATT B | 1188 |
| | | | | stab4 sense | | |
| 733 | AACAGCUUGGAACACCAUGUCCU | 1121 | | MAPK8:753L21 siRNA | GAcAuGGuGuuccaagcuGTsT | 1189 |
| | | | | (735C) stab5 antisense | | |
| 853 | UUUUCCCAGCUGACUCAGAACAC | 1122 | | MAPK8:873L21 siRNA | GuucuGAGucAGcuGGGAATsT | 1190 |
| | | | | (855C) stab5 antisense | | |
| 1224 | CAAUGUCAACAGAUCCGACUUUG | 1123 | | MAPK8:1244L21 siRNA | AAGucGGAucuGuuGAcAuTsT | 1191 |
| | | | | (1226C) stab5 antisense | | |
| 1242 | CUUUGGCCUCUGAUACAGACAGC | 1124 | | MAPK8:1262L21 siRNA | uGucuGuAucAGAGGccAATsT | 1192 |
| | | | | (1244C) stab5 antisense | | |
| 733 | AACAGCUUGGAACACCAUGUCCU | 1121 | | MAPK8:735U21 siRNA | B cAGcuuGGAAcAccAuGucTT B | 1193 |
| | | | | stab7 sense | | |
| 853 | UUUUCCCAGCUGACUCAGAACAC | 1122 | | MAPK8:855U21 siRNA | B uucccAGcuGAcucAGAAcTT B | 1194 |
| | | | | stab7 sense | | |
| 1224 | CAAUGUCAACAGAUCCGACUUUG | 1123 | | MAPK8:1226U21 siRNA | B AuGucAAcAGAuccGAcuuTT B | 1195 |
| | | | | stab7 sense | | |
| 1242 | CUUUGGCCUCUGAUACAGACAGC | 1124 | | MAPK8:1244U21 siRNA | B uuGGccucuGAuAcAGAcATT B | 1196 |
| | | | | stab7 sense | | |
| 733 | AACAGCUUGGAACACCAUGUCCU | 1121 | | MAPK8:753L21 siRNA | GAcAuGGuGuuccAAGcuGTsT | 1197 |
| | | | | (735C) stab11 antisense | | |
| 853 | UUUUCCCAGCUGACUCAGAACAC | 1122 | | MAPK8:873L21 siRNA | GuucuGAGucAGcuGGGAATsT | 1198 |
| | | | | (855C) stab11 antisense | | |
| 1224 | CAAUGUCAACAGAUCCGACUUUG | 1123 | | MAPK8:1244L21 siRNA | AAGucGGAucuGuuGAcAuTsT | 1199 |
| | | | | (1226C) stab11 antisense | | |
| 1242 | CUUUGGCCUCUGAUACAGACAGC | 1124 | | MAPK8:1262L21 siRNA | uGucuGuAucAGAGGccAATsT | 1200 |
| | | | | (1244C) stab11 antisense | | |

MAPK14/p38

| | | | | | | |
|---|---|---|---|---|---|---|
| 1278 | GCCUACUUUGCUCAGUACCACGA | 1125 | 31586 | MAPK14:1280U21 siRNA sense | CUACUUUGCUCAGUACCACTT | 1201 |
| 1609 | UGUCUGUCUUUGUGGGAGGGUAA | 1126 | 31587 | MAPK14:1611U21 siRNA sense | UCUGUCUUUGUGGGAGGGUTT | 1202 |
| 2882 | AAAAGGGUCUUCUUGGCAGCUUA | 1127 | 31588 | MAPK14:2884U21 siRNA sense | AAGGGUCUUCUUGGCAGCUTT | 1203 |
| 3554 | GGACUCUAAGCUGGAGCUCUUGG | 1128 | 31589 | MAPK14:3556U21 siRNA sense | ACUCUAAGCUGGAGCUCUUTT | 1204 |
| 1278 | GCCUACUUUGCUCAGUACCACGA | 1125 | 31590 | MAPK14:1298L21 siRNA | GUGGUACUGAGCAAAGUAGTT | 1205 |
| | | | | (1280C) antisense | | |
| 1609 | UGUCUGUCUUUGUGGGAGGGUAA | 1126 | 31591 | MAPK14:1629L21 siRNA | ACCCUCCCACAAAGACAGATT | 1206 |
| | | | | (1611C) antisense | | |
| 2882 | AAAAGGGUCUUCUUGGCAGCUUA | 1127 | 31592 | MAPK14:2902L21 siRNA | AGCUGCCAAGAAGACCCUUTT | 1207 |
| | | | | (2884C) antisense | | |
| 3554 | GGACUCUAAGCUGGAGCUCUUGG | 1128 | 31593 | MAPK14:3574L21 siRNA | AAGAGCUCCAGCUUAGAGUTT | 1208 |
| | | | | (3556C) antisense | | |
| 1278 | GCCUACUUUGCUCAGUACCACGA | 1125 | | MAPK14:1280U21 siRNA | B cuAcuuuGcucAGuAccAcTT B | 1209 |
| | | | | stab04 sense | | |
| 1609 | UGUCUGUCUUUGUGGGAGGGUAA | 1126 | | MAPK14:1611U21 siRNA | B ucuGucuuuGuGGGAGGGuTT B | 1210 |
| | | | | stab04 sense | | |
| 2882 | AAAAGGGUCUUCUUGGCAGCUUA | 1127 | | MAPK14:2884U21 siRNA | B AAGGGucuucuuGGcAGcuTT B | 1211 |
| | | | | stab04 sense | | |
| 3554 | GGACUCUAAGCUGGAGCUCUUGG | 1128 | | MAPK14:3556U21 siRNA | B AcucuAAGcuGGAGcucuuTT B | 1212 |
| | | | | stab04 sense | | |
| 1278 | GCCUACUUUGCUCAGUACCACGA | 1125 | | MAPK14:1298L21 siRNA | GuGGuAcuGAGcAAAGuAGTsT | 1213 |
| | | | | (1280C) stab05 antisense | | |
| 1609 | UGUCUGUCUUUGUGGGAGGGUAA | 1126 | | MAPK14:1629L21 siRNA | AcccucccAcAAAGAcAGATsT | 1214 |
| | | | | (1611C) stab05 antisense | | |
| 2882 | AAAAGGGUCUUCUUGGCAGCUUA | 1127 | | MAPK14:2902L21 siRNA | AGCuGccAAGAAGAcccuuTsT | 1215 |
| | | | | (2884C) stab05 antisense | | |
| 3554 | GGACUCUAAGCUGGAGCUCUUGG | 1128 | | MAPK14:3574L21 siRNA | AAGAGcuccAGcuuAGAGuTsT | 1216 |
| | | | | (3556C) stab05 antisense | | |
| 1278 | GCCUACUUUGCUCAGUACCACGA | 1125 | | MAPK14:1280U21 siRNA | B cuAcuuuGcucAGuAccAcTT B | 1217 |
| | | | | stab07 sense | | |
| 1609 | UGUCUGUCUUUGUGGGAGGGUAA | 1126 | | MAPK14:1611U21 siRNA | B ucuGucuuuGuGGGAGGGuTT B | 1218 |
| | | | | stab07 sense | | |
| 2882 | AAAAGGGUCUUCUUGGCAGCUUA | 1127 | | MAPK14:2884U21 siRNA | B AAGGGucuucuuGGcAGcuTT B | 1219 |
| | | | | stab07 sense | | |
| 3554 | GGACUCUAAGCUGGAGCUCUUGG | 1128 | | MAPK14:3556U21 siRNA | B AcucuAAGcuGGAGcucuuTT B | 1220 |
| | | | | stab07 sense | | |
| 1278 | GCCUACUUUGCUCAGUACCACGA | 1125 | | MAPK14:1298L21 siRNA | GuGGuAcuGAGcAAAGuAGTsT | 1221 |
| | | | | (1280C) stab11 antisense | | |
| 1609 | UGUCUGUCUUUGUGGGAGGGUAA | 1126 | | MAPK14:1629L21 siRNA | AcccucccAcAAAGAcAGATsT | 1222 |
| | | | | (1611C) stab11 antisense | | |
| 2882 | AAAAGGGUCUUCUUGGCAGCUUA | 1127 | | MAPK14:2902L21 siRNA | AGcuGccAAGAAGAcccuuTsT | 1223 |
| | | | | (2884C) stab11 antisense | | |
| 3554 | GGACUCUAAGCUGGAGCUCUUGG | 1128 | | MAPK14:3574L21 siRNA | AAGAGcuccAGcuuAGAGuTsT | 1224 |
| | | | | (3556C) stab11 antisense | | |

c-JUN

| | | | | | | |
|---|---|---|---|---|---|---|
| 1817 | GGAAAAAGUGAAAACCUUGAAAG | 1609 | | JUN:1819U21 siRNA sense | AAAAAGUGAAAACCUUGAATT | 1617 |
| 1935 | CAACUCAUGCUAACGCAGCAGUU | 1610 | | JUN:1937U21 siRNA sense | ACUCAUGCUAACGCAGCAGTT | 1618 |
| 2259 | CAUUGACCAAGAACUGCAUGGAC | 1611 | | JUN:2261U21 siRNA sense | UUGACCAAGAACUGCAUGGTT | 1619 |
| 2264 | ACCAAGAACUGCAUGGACCUAAC | 1612 | | JUN:2266U21 siRNA sense | CAAGAACUGCAUGGACCUATT | 1620 |
| 2269 | GAACUGCAUGGACCUAACAUUCG | 1613 | | JUN:2271U21 siRNA sense | ACUGCAUGGACCUAACAUUTT | 1621 |
| 2270 | AACUGCAUGGACCUAACAUUCGA | 1614 | | JUN:2272U21 siRNA sense | CUGCAUGGACCUAACAUUCTT | 1622 |
| 2272 | CUGCAUGGACCUAACAUUCGAUC | 1615 | | JUN:2274U21 siRNA sense | GCAUGGACCUAACAUUCGATT | 1623 |
| 2274 | GCAUGGACCUAACAUUCGAUCUC | 1616 | | JUN:2276U21 siRNA sense | AUGGACCUAACAUUCGAUCTT | 1624 |
| 1817 | GGAAAAAGUGAAAACCUUGAAAG | 1609 | | JUN:1837L21 siRNA (1819C) | UUCAAGGUUUUCACUUUUUTT | 1625 |
| | | | | antisense | | |
| 1935 | CAACUCAUGCUAACGCAGCAGUU | 1610 | | JUN:1955L21 siRNA (1937C) | CUGCUGCGUUAGCAUGAGUTT | 1626 |
| | | | | antisense | | |
| 2259 | CAUUGACCAAGAACUGCAUGGAC | 1611 | | JUN:2279L21 siRNA (2261C) | CCAUGCAGUUCUUGGUCAATT | 1627 |
| | | | | antisense | | |
| 2264 | ACCAAGAACUGCAUGGACCUAAC | 1612 | | JUN:2284L21 siRNA (2266C) | UAGGUCCAUGCAGUUCUUGTT | 1628 |
| | | | | antisense | | |
| 2269 | GAACUGCAUGGACCUAACAUUCG | 1613 | | JUN:2289L21 siRNA (2271C) | AAUGUUAGGUCCAUGCAGUTT | 1629 |
| | | | | antisense | | |
| 2270 | AACUGCAUGGACCUAACAUUCGA | 1614 | | JUN:2290L21 siRNA (2272C) | GAAUGUUAGGUCCAUGCAGTT | 1630 |
| | | | | antisense | | |
| 2272 | CUGCAUGGACCUAACAUUCGAUC | 1615 | | JUN:2292L21 siRNA (2274C) | UCGAAUGUUAGGUCCAUGCTT | 1631 |
| | | | | antisense | | |
| 2274 | GCAUGGACCUAACAUUCGAUCUC | 1616 | | JUN:2294L21 siRNA (2276C) | GAUCGAAUGUUAGGUCCAUTT | 1632 |
| | | | | antisense | | |
| 1817 | GGAAAAAGUGAAAACCUUGAAAG | 1609 | | JUN:1819U21 siRNA stab04 | B AAAAAGuGAAAAccuuGAATT B | 1633 |
| | | | | sense | | |
| 1935 | CAACUCAUGGUAACGCAGCAGUU | 1610 | | JUN:1937U21 siRNA stab04 | B AcucAuGcuAAcGcAGcAGTT B | 1634 |
| | | | | sense | | |
| 2259 | CAUUGACCAAGAACUGCAUGGAC | 1611 | | JUN:2261U21 siRNA stab04 | B uuGAccAAGAAcuGcAuGGTT B | 1635 |
| | | | | sense | | |
| 2264 | ACCAAGAACUGCAUGGACCUAAC | 1612 | | JUN:2266U21 siRNA stab04 | B cAAGAAcuGcAuGGAccuATT B | 1636 |
| | | | | sense | | |
| 2269 | GAACUGCAUGGAGCUAACAUUCG | 1613 | | JUN:2271U21 siRNA stab04 | B AcuGcAuGGAccuAAcAuuTT B | 1637 |
| | | | | sense | | |
| 2270 | AACUGCAUGGACCUAACAUUCGA | 1614 | | JUN:2272U21 siRNA stab04 | B cuGcAuGGAccuAAcAuucTT B | 1638 |
| | | | | sense | | |
| 2272 | CUGCAUGGAGCUAACAUUCGAUC | 1615 | | JUN:2274U21 siRNA stab04 | B GcAuGGAccuAAcAuucGATT B | 1639 |
| | | | | sense | | |
| 2274 | GCAUGGACCUAACAUUCGAUCUC | 1616 | | JUN:2276U21 siRNA stab04 | B AuGGAccuAAcAuucGAucTT B | 1640 |
| | | | | sense | | |
| 1817 | GGAAAAAGUGAAAACCUUGAAAG | 1609 | | JUN:1837L21 siRNA (1819C) | uucAAGGuuuucAcuuuuuTsT | 1641 |
| | | | | stab05 antisense | | |
| 1935 | CAACUCAUGCUAACGCAGCAGUU | 1610 | | JUN:1955L21 siRNA (1937C) | cuGcuGcGuuAGcAuGAGuTsT | 1642 |
| | | | | stab05 antisense | | |
| 2259 | CAUUGACCAAGAACUGCAUGGAC | 1611 | | JUN:2279L21 siRNA (2261C) | ccAuGcAGuucuuGGucAATsT | 1643 |
| | | | | stab05 antisense | | |
| 2264 | ACCAAGAACUGCAUGGACCUAAC | 1612 | | JUN:2284L21 siRNA (2266C) | uAGGuccAuGcAGuucuuGTsT | 1644 |
| | | | | stab05 antisense | | |
| 2269 | GAACUGCAUGGACCUAACAUUCG | 1613 | | JUN:2289L21 siRNA (2271C) | AAuGuuAGGuccAuGcAGuTsT | 1645 |
| | | | | stab05 antisense | | |
| 2270 | AACUGCAUGGACCUAACAUUCGA | 1614 | | JUN:2290L21 siRNA (2272C) | GAAuGuuAGGuccAuGcAGTsT | 1646 |
| | | | | stab05 antisense | | |
| 2272 | CUGCAUGGACCUAACAUUCGAUC | 1615 | | JUN:2292L21 siRNA (2274C) | ucGAAuGuuAGGuccAuGcTsT | 1647 |
| | | | | stab05 antisense | | |
| 2274 | GCAUGGACCUAACAUUCGAUCUC | 1616 | | JUN:2294L21 siRNA (2276C) | GAucGAAuGuuAGGuccAuTsT | 1648 |
| | | | | stab05 antisense | | |
| 1817 | GGAAAAAGUGAAAACCUUGAAAG | 1609 | 31818 | JUN:1819U21 siRNA | B AAAAAGuGAAAAccuuGAATT B | 1649 |
| | | | | stab07 sense | | |
| 1935 | CAACUCAUGCUAACGCAGCAGUU | 1610 | 31819 | JUN:1937U21 siRNA | B AcucAuGcuAAcGcAGcAGTT B | 1650 |
| | | | | stab07 sense | | |
| 2259 | CAUUGACCAAGAACUGCAUGGAC | 1611 | 31820 | JUN:2261U21 siRNA | B uuGAccAAGAAcuGcAuGGTT B | 1651 |
| | | | | stab07 sense | | |
| 2264 | ACCAAGAACUGCAUGGACCUAAC | 1612 | 31821 | JUN:2266U21 siRNA | B cAAGAAcuGcAuGGAccuATT B | 1652 |
| | | | | stab07 sense | | |
| 2269 | GAACUGCAUGGACCUAACAUUCG | 1613 | 31822 | JUN:2271U21 siRNA | B AcuGcAuGGAccuAAcAuuTT B | 1653 |
| | | | | stab07 sense | | |
| 2270 | AACUGCAUGGACCUAACAUUCGA | 1614 | 31823 | JUN:2272U21 siRNA | B cuGcAuGGAccuAAcAuucTT B | 1654 |
| | | | | stab07 sense | | |
| 2272 | CUGCAUGGACCUAACAUUCGAUC | 1615 | 31824 | JUN:2274U21 siRNA | B GcAuGGAccuAAcAuucGATT B | 1655 |
| | | | | stab07 sense | | |
| 2274 | GCAUGGACCUAACAUUCGAUCUC | 1616 | 31825 | JUN:2276U21 siRNA | B AuGGAccuAAcAuucGAucTT B | 1656 |
| | | | | stab07 sense | | |
| 1817 | GGAAAAAGUGAAAACCUUGAAAG | 1609 | | JUN:1837L21 siRNA | uucAAGGuuuucAcuuuuuTsT | 1657 |
| | | | | (1819C) stab11 antisense | | |
| 1935 | CAACUCAUGCUAACGCAGCAGUU | 1610 | | JUN:1955L21 siRNA | cuGcuGcGuuAGcAuGAGuTsT | 1658 |
| | | | | (1937C) stab11 antisense | | |
| 2259 | CAUUGACCAAGAACUGCAUGGAC | 1611 | | JUN:2279L21 siRNA | ccAuGcAGuucuuGGucAATsT | 1659 |
| | | | | (2261C) stab11 antisense | | |
| 2264 | ACCAAGAACUGCAUGGACGUAAC | 1612 | | JUN:2284L21 siRNA | uAGGuccAuGcAGuucuuGTsT | 1660 |
| | | | | (2266C) stab11 antisense | | |
| 2269 | GAACUGCAUGGACCUAACAUUCG | 1613 | | JUN:2289L21 siRNA | AAuGuuAGGuccAuGcAGuTsT | 1661 |
| | | | | (2271C) stab11 antisense | | |
| 2270 | AACUGCAUGGACCUAACAUUCGA | 1614 | | JUN:2290L21 siRNA | GAAuGuuAGGuccAuGcAGTsT | 1662 |
| | | | (2272C) stab11 antisense | | | |
| 2272 | CUGCAUGGACCUAACAUUCGAUC | 1615 | | JUN:2292L21 siRNA | ucGAAuGuuAGGuccAuGcTsT | 1663 |
| | | | | (2274C) stab11 antisense | | |
| 2274 | GCAUGGACCUAACAUUCGAUCUC | 1616 | | JUN:2294L21 siRNA (2276C) | GAucGAAuGuuAGGuccAuTsT | 1664 |
| | | | | stab11 antisense | | |
| 1817 | GGAAAAAGUGAAAACCUUGAAAG | 1609 | | JUN:1819U21 siRNA stab08 | AAAAAGuGAAAAccuuGAATsT | 1665 |
| | | | | sense | | |
| 1935 | CAACUCAUGCUAACGCAGCAGUU | 1610 | | JUN:1937U21 siRNA stab08 | AcucAuGcuAAcGcAGcAGTsT | 1666 |
| | | | | sense | | |
| 2259 | CAUUGACCAAGAACUGCAUGGAC | 1611 | | JUN:2261U21 siRNA stab08 | uuGAccAAGAAcuGcAuGGTsT | 1667 |
| | | | | sense | | |
| 2264 | ACCAAGAACUGCAUGGACCUAAC | 1612 | | JUN:2266U21 siRNA stab08 | cAAGAAcuGcAuGGAccuATsT | 1668 |
| | | | | sense | | |
| 2269 | GAACUGCAUGGACCUAACAUUCG | 1613 | | JUN:2271U21 siRNA stab08 | AcuGcAuGGAccuAAcAuuTsT | 1669 |
| | | | | sense | | |
| 2270 | AACUGCAUGGACCUAACAUUCGA | 1614 | | JUN:2272U21 siRNA stab08 | cuGcAuGGAccuAAcAuucTsT | 1670 |
| | | | | sense | | |
| 2272 | CUGCAUGGACCUAACAUUCGAUC | 1615 | | JUN:2274U21 siRNA stab08 | GcAcGGAccuAACAuucGATsT | 1671 |
| | | | | sense | | |
| 2274 | GCAUGGACCUAACAUUCGAUCUC | 1616 | | JUN:2276U21 siRNA stab08 | AuGGAccuAAcAuucGAucTsT | 1672 |
| | | | | sense | | |
| 1817 | GGAAAAAGUGAAAACCUUGAAAG | 1609 | 31826 | JUN:1837L21 siRNA (1819C) | uucAAGGuuuucAcuuuuuTsT | 1673 |
| | | | | stab08 antisense | | |
| 1935 | CAACUCAUGCUAACGCAGCAGUU | 1610 | 31827 | JUN:1955L21 siRNA (1937C) | cuGcuGcGuuAGcAuGAGuTsT | 1674 |
| | | | | stab08 antisense | | |
| 2259 | CAUUGACCAAGAACUGCAUGGAC | 1611 | 31828 | JUN:2279L21 siRNA (2261C) | ccAuGcAGuucuuGGucAATsT | 1675 |
| | | | | stab08 antisense | | |
| 2264 | ACCAAGAACUGCAUGGACCUAAC | 1612 | 31829 | JUN:2284L21 siRNA (2266C) | uAGGuccAuGcAGuucuuGTsT | 1676 |
| | | | | stab08 antisense | | |
| 2269 | GAACUGCAUGGACCUAACAUUCG | 1613 | 31830 | JUN:2289L21 siRNA (2271C) | AAuGuuAGGuccAuGcAGuTsT | 1677 |
| | | | | stab08 antisense | | |
| 2270 | AACUGCAUGGACCUAACAUUCGA | 1614 | 31831 | JUN:2290L21 siRNA (2272C) | GAAuGuuAGGuccAuGcAGTsT | 1678 |
| | | | | stab08 antisense | | |
| 2272 | CUGCAUGGACCUAACAUUCGAUC | 1615 | 31832 | JUN:2292L21 siRNA (2274C) | ucGAAuGuuAGGuccAuGcTsT | 1679 |
| | | | | stab08 antisense | | |
| 2274 | GCAUGGACCUAACAUUCGAUCUC | 1616 | 31833 | JUN:2294L21 siRNA (2276C) | GAucGAAuGuuAGGuccAuTsT | 1680 |
| | | | | stab08 antisense | | |
| 1817 | GGAAAAAGUGAAAACCUUGAAAG | 1609 | 31834 | JUN:1819U21 siRNA | B AAGuuccAAAAGuGAAAAATT B | 1681 |
| | | | | inv stab07 sense | | |
| 1935 | CAACUCAUGCUAACGCAGCAGUU | 1610 | 31835 | JUN:1937U21 siRNA | B GAcGAcGcAAucGuAcucATT B | 1682 |
| | | | | inv stab07 sense | | |
| 2259 | CAUUGACCAAGAACUGCAUGGAC | 1611 | 31836 | JUN:2261U21 siRNA | B GGuAcGucAAGAAccAGuuTT B | 1683 |
| | | | | inv stab07 sense | | |
| 2264 | ACCAAGAACUGCAUGGACCUAAC | 1612 | 31837 | JUN:2266U21 siRNA | B AuccAGGuAcGucAAGAAcTT B | 1684 |
| | | | | inv stab07 sense | | |
| 2269 | GAACUGCAUGGACCUAACAUUCG | 1613 | 31838 | JUN:2271U21 siRNA | B uuAcAAuccAGGuAcGucATT B | 1685 |
| | | | | inv stab07 sense | | |
| 2270 | AACUGCAUGGACCUAACAUUCGA | 1614 | 31839 | JUN:2272U21 siRNA | B cuuAcAAuccAGGuAcGucTT B | 1686 |
| | | | | inv stab07 sense | | |
| 2272 | CUGCAUGGACCUAACAUUCGAUC | 1615 | 31840 | JUN:2274U21 siRNA | B AGcuuAcAAuccAGGuAcGTT B | 1687 |
| | | | | inv stab07 sense | | |
| 2274 | GCAUGGACCUAACAUUCGAUCUC | 1616 | 31841 | JUN:2276U21 siRNA | B cuAGcuuAcAAuccAGGuATT B | 1688 |
| | | | | inv stab07 sense | | |
| 1817 | GGAAAAAGUGAAAACCUUGAAAG | 1609 | 31842 | JUN:1837L21 siRNA | uuuuucAcuuuuGGAAcuuTsT | 1689 |
| | | | | (1819C) inv stab08 | | |
| | | | | antisense | | |
| 1935 | CAACUCAUGCUAACGCAGCAGUU | 1610 | 31843 | JUN:1955L21 siRNA | uGAGuAcGAuuGcGucGucTsT | 1690 |
| | | | | (1937C) inv stab08 | | |
| | | | | antisense | | |
| 2259 | CAUUGACCAAGAAGUGCAUGGAC | 1611 | 31844 | JUN:2279L21 siRNA | AAcuGGuucuuGAcGuAccTsT | 1691 |
| | | | | (2261C) inv stab08 | | |
| | | | | antisense | | |
| 2264 | AGCAAGAACUGCAUGGACGUAAC | 1612 | 31845 | JUN:2284L21 siRNA | GuucuuGAcGuAccuGGAuTsT | 1692 |
| | | | | (2266C) inv stab08 | | |
| | | | | antisense | | |
| 2269 | GAACUGCAUGGACCUAACAUUCG | 1613 | 31846 | JUN:2289L21 siRNA | uGAcGuAccuGGAuuGuAATsT | 1693 |
| | | | | (2271C) inv stab08 | | |
| | | | | antisense | | |
| 2270 | AACUGCAUGGACCUAACAUUCGA | 1614 | 31847 | JUN:2290L21 siRNA (2272C) | GAcGuAccuGGAuuGuAAGTsT | 1694 |
| | | | | inv stab08 antisense | | |
| 2272 | CUGCAUGGACCUAACAUUCGAUC | 1615 | 31848 | JUN:2292L21 siRNA (2274C) | cGuAccuGGAuuGuAAGcuTsT | 1695 |
| | | | | inv stab08 antisense | | |
| 2274 | GCAUGGACCUAACAUUCGAUCUC | 1616 | 31849 | JUN:2294L21 siRNA (2276C) | uAccuGGAuuGuAAGcuAGTsT | 1696 |
| | | | | inv stab08 antisense | | |

Uppercase = ribonucleotide
u,c = 2′-deoxy-2′-fluoro U, C
A = 2′-O-methyl Adenosine
G = 2′-O-methyl Guanosine
T = thymidine
B = inverted deoxy abasic
s = phosphorothioate linkage
A = deoxy Adenosine
G = deoxy Guanosine

[0363] TABLE IV
Non-limiting examples of Stabilization Chemistries for chemically modified siNA
constructs

| Chemistry | pyrimidine | Purine | cap | p = S | Strand |
|---|---|---|---|---|---|
| “Stab 1” | Ribo | Ribo | — | 5 at 5′-end | S/AS |
| | | | | 1 at 3′-end | |
| “Stab 2” | Ribo | Ribo | — | All linkages | Usually AS |
| “Stab 3” | 2′-fluoro | Ribo | — | 4 at 5′-end | Usually S |
| | | | | 4 at 3′-end | |
| “Stab 4” | 2′-fluoro | Ribo | 5′ and 3′-ends | — | Usually S |
| “Stab 5” | 2′-fluoro | Ribo | — | 1 at 3′-end | Usually AS |
| “Stab 6” | 2′-O-Methyl | Ribo | 5′ and 3′-ends | — | Usually S |
| “Stab 7” | 2′-fluoro | 2′-deoxy | 5′ and 3′-ends | — | Usually S |
| “Stab 8” | 2′-fluoro | 2′-O-Methyl | — | 1 at 3′-end | S or AS |
| “Stab 9” | Ribo | Ribo | 5′ and 3′-ends | — | Usually S |
| “Stab 10” | Ribo | Ribo | — | 1 at 3′-end | Usually AS |
| “Stab 11” | 2′-fluoro | 2′-deoxy | — | 1 at 3′-end | Usually AS |
| “Stab 12” | 2′-fluoro | LNA | 5′ and 3′-ends | | Usually S |
| “Stab 13” | 2′-fluoro | LNA | | 1 at 3′-end | Usually AS |
| “Stab 14” | 2′-fluoro | 2′-deoxy | | 2 at 5′-end | Usually AS |
| | | | | 1 at 3′-end | |
| “Stab 15” | 2′-deoxy | 2′-deoxy | | 2 at 5′-end | Usually AS |
| | | | | 1 at 3′-end | |
| “Stab 16” | Ribo | 2′-O-Methyl | 5′ and 3′-ends | | Usually S |
| “Stab 17” | 2′-O-Methyl | 2′-O-Methyl | 5′ and 3′-ends | | Usually S |
| “Stab 18” | 2′-fluoro | 2′-O-Methyl | | 1 at 3′-end | Usually AS |

CAP = any terminal cap, see for example Figure 10.
All Stab 1-18 chemistries can comprise 3′-terminal thymidine (TT) residues
All Stab 1-18 chemistries typically comprise 21 nucleotides, but can vary as described herein.
S = sense strand
AS = antisense strand

[0364] TABLE V
A. 2.5 μmol Synthesis Cycle ABI 394 Instrument

| Reagent | Equivalents | Amount | Wait Time* DNA | Wait Time* 2′-O-methyl | Wait Time* RNA |
|---|---|---|---|---|---|
| Phosphoramidites | 6.5 | 163 μL | 45 sec | 2.5 min | 7.5 min |
| S-Ethyl Tetrazole | 23.8 | 238 μL | 45 sec | 2.5 min | 7.5 min |
| Acetic Anhydride | 100 | 233 μL | 5 sec | 5 sec | 5 sec |
| N-Methyl | 186 | 233 μL | 5 sec | 5 sec | 5 sec |
| Imidazole | | | | | |
| TCA | 176 | 2.3 mL | 21 sec | 21 sec | 21 sec |
| Iodine | 11.2 | 1.7 mL | 45 sec | 45 sec | 45 sec |
| Beaucage | 12.9 | 645 μL | 100 sec | 300 sec | 300 sec |
| Acetonitrile | NA | 6.67 mL | NA | NA | NA |

B. 0.2 μmol Synthesis Cycle ABI 394 Instrument

| Reagent | Equivalents | Amount | Wait Time* DNA | Wait Time* 2′-O-methyl | Wait Time* RNA |
|---|---|---|---|---|---|
| Phosphoramidites | 15 | 31 μL | 45 sec | 233 sec | 465 sec |
| S-Ethyl Tetrazole | 38.7 | 31 μL | 45 sec | 233 min | 465 sec |
| Acetic Anhydride | 655 | 124 μL | 5 sec | 5 sec | 5 sec |
| N-Methyl | 1245 | 124 μL | 5 sec | 5 sec | 5 sec |
| Imidazole | | | | | |
| TCA | 700 | 732 μL | 10 sec | 10 sec | 10 sec |
| Iodine | 20.6 | 244 μL | 15 sec | 15 sec | 15 sec |
| Beaucage | 7.7 | 232 μL | 100 sec | 300 sec | 300 sec |
| Acetonitrile | NA | 2.64 mL | NA | NA | NA |

C. 0.2 μmol Synthesis Cycle 96 well Instrument

| | Equivalents:DNA/ | Amount: DNA/2′-O- | | Wait Time* 2′-O- | |
|---|---|---|---|---|---|
| Reagent | 2′-O-methyl/Ribo | methyl/Ribo | Wait Time* DNA | methyl | Wait Time* Ribo |
| Phosphoramidites | 22/33/66 | 40/60/120 μL | 60 sec | 180 sec | 360 sec |
| S-Ethyl Tetrazole | 70/105/210 | 40/60/120 μL | 60 sec | 180 min | 360 sec |
| Acetic Anhydride | 265/265/265 | 50/50/50 μL | 10 sec | 10 sec | 10 sec |
| N-Methyl | 502/502/502 | 50/50/50 μL | 10 sec | 10 sec | 10 sec |
| Imidazole | | | | | |
| TCA | 238/475/475 | 250/500/500 μL | 15 sec | 15 sec | 15 sec |
| Iodine | 6.8/6.8/6.8 | 80/80/80 μL | 30 sec | 30 sec | 30 sec |
| Beaucage | 34/51/51 | 80/120/120 | 100 sec | 200 sec | 200 sec |
| Acetonitrile | NA | 1150/1150/1150 μL | NA | NA | NA |

*Wait time does not include contact time during delivery.
*Tandem synthesis utilizes double coupling of linker molecule

What we claim is:

1. A double-stranded short interfering nucleic acid (siNA) molecule that down-regulates expression of a c-JUN gene, wherein said siNA molecule comprises about 21 nucleotides.

2. The siNA molecule of claim 1, wherein said siNA molecule does not contain any ribonucleotides.

3. The siNA molecule of claim 1, wherein said siNA molecule comprises one or more ribonucleotides.

4. The siNA molecule of claim 1, wherein one of the strands of said double-stranded siNA molecule comprises a nucleotide sequence that is complementary to a nucleotide sequence of a c-JUN gene or a portion thereof, and wherein the second strand of said double-stranded siNA molecule comprises a nucleotide sequence substantially similar to the nucleotide sequence of said c-JUN gene or a portion thereof.

5. The siNA molecule of claim 4, wherein each strand of the siNA molecule comprises about 19 to about 23 nucleotides, and wherein each strand comprises at least about 19 nucleotides that are complementary to the nucleotides of the other strand.

6. The siNA molecule of claim 1, wherein said siNA molecule comprises an antisense region comprising a nucleotide sequence that is complementary to a nucleotide sequence of a c-JUN gene or a portion thereof, and wherein said siNA further comprises a sense region, wherein said sense region comprises a nucleotide sequence substantially similar to the nucleotide sequence of said c-JUN gene or a portion thereof.

7. The siNA molecule of claim 6, wherein said antisense region and said sense region each comprise about 19 to about 23 nucleotides, and wherein said antisense region comprises at least about 19 nucleotides that are complementary to nucleotides of the sense region.

8. The siNA molecule of claim 1, wherein said siNA molecule comprises a sense region and an antisense region and wherein said antisense region comprises a nucleotide sequence that is complementary to a nucleotide sequence of RNA encoded by a c-JUN gene or a portion thereof and said sense region comprises a nucleotide sequence that is complementary to said antisense region.

9. The siNA molecule of claim 6, wherein said siNA molecule is assembled from two separate oligonucleotide fragments wherein one fragment comprises the sense region and the second fragment comprises the antisense region of said siNA molecule.

10. The siNA molecule of claim 6, wherein said sense region is connected to the antisense region via a linker molecule.

11. The siNA molecule of claim 10, wherein said linker molecule is a polynucleotide linker.

12. The siNA molecule of claim 10, wherein said linker molecule is a non-nucleotide linker.

13. The siNA molecule of claim 6, wherein pyrimidine nucleotides in the sense region are 2′-O-methyl pyrimidine nucleotides.

14. The siNA molecule of claim 6, wherein purine nucleotides in the sense region are 2′-deoxy purine nucleotides.

15. The siNA molecule of claim 6, wherein the pyrimidine nucleotides present in the sense region are 2′-deoxy-2′-fluoro pyrimidine nucleotides.

16. The siNA molecule of claim 9, wherein the fragment comprising said sense region includes a terminal cap moiety at the 5′-end, the 3′-end, or both of the 5′ and 3′ ends of the fragment comprising said sense region.

17. The siNA molecule of claim 16, wherein said terminal cap moiety is an inverted deoxy abasic moiety.

18. The siNA molecule of claim 6, wherein the pyrimidine nucleotides of said antisense region are 2′-deoxy-2′-fluoro pyrimidine nucleotides

19. The siNA molecule of claim 6, wherein the purine nucleotides of said antisense region are 2′-O-methyl purine nucleotides.

20. The siNA molecule of claim 6, wherein the purine nucleotides present in said antisense region comprise 2′-deoxy-purine nucleotides.

21. The siNA molecule of claim 18, wherein said antisense region comprises a phosphorothioate internucleotide linkage at the 3′ end of said antisense region.

22. The siNA molecule of claim 6, wherein said antisense region comprises a glyceryl modification at the 3′ end of said antisense region.

23. The siNA molecule of claim 9, wherein each of the two fragments of said siNA molecule comprise 21 nucleotides.

24. The siNA molecule of claim 23, wherein about 19 nucleotides of each fragment of the siNA molecule are base-paired to the complementary nucleotides of the other fragment of the siNA molecule and wherein at least two 3′ terminal nucleotides of each fragment of the siNA molecule are not base-paired to the nucleotides of the other fragment of the siNA molecule.

25. The siNA molecule of claim 24, wherein each of the two 3′ terminal nucleotides of each fragment of the siNA molecule are 2′-deoxy-pyrimidines.

26. The siNA molecule of claim 25, wherein said 2′-deoxy-pyrimidine is 2′-deoxy-thymidine.

27. The siNA molecule of claim 23, wherein all 21 nucleotides of each fragment of the siNA molecule are base-paired to the complementary nucleotides of the other fragment of the siNA molecule.

28. The siNA molecule of claim 23, wherein about 19 nucleotides of the antisense region are base-paired to the nucleotide sequence of the RNA encoded by a c-JUN gene or a portion thereof.

29. The siNA molecule of claim 23, wherein 21 nucleotides of the antisense region are base-paired to the nucleotide sequence of the RNA encoded by a c-JUN gene or a portion thereof.

30. The siNA molecule of claim 9, wherein the 5′-end of the fragment comprising said antisense region optionally includes a phosphate group.

31. A double-stranded short interfering nucleic acid (siNA) molecule that down-regulates the expression of a c-JUN gene, wherein said siNA molecule does not contain any ribonucleotides and wherein each strand of said double-stranded siNA molecule comprises about 21 nucleotides.

32. A double-stranded short interfering nucleic acid (siNA) molecule that down-regulates the expression of a c-JUN gene, wherein said siNA molecule does not require the presence of a ribonucleotide within the siNA molecule for said down-regulation of expression of the c-JUN gene and wherein each strand of said double-stranded siNA molecule comprises about 21 nucleotides.

33. A pharmaceutical composition comprising the siNA molecule of claim 1 in an acceptable carrier or diluent.

34. A medicament comprising the siNA molecule of claim 1.

35. Active ingredient comprising the siNA molecule of claim 1.

36. Use of a double-stranded short interfering nucleic acid (siNA) molecule to down-regulate expression of a c-JUN gene, wherein said siNA molecule comprises one or more chemical modifications and each strand of said double-stranded siNA comprises about 21 nucleotides.

The application's sequence listing, which the Patent Office published only in electronic form, follows.

SEQUENCE LISTING (1714 sequences)

SEQ ID NO: 1 - RNA, 19 nt, Artificial Sequence
  Description of Artificial Sequence:  Target sequence/siNA sense region
cccucccuccgcccgcccg

SEQ ID NO: 2 - RNA, 19 nt, Artificial Sequence
  Description of Artificial Sequence:  Target sequence/siNA sense region
gccggcccgcccgucaguc

SEQ ID NO: 3 - RNA, 19 nt, Artificial Sequence
  Description of Artificial Sequence:  Target sequence/siNA sense region
cuggcaggcaggcaggcaa

SEQ ID NO: 4 - RNA, 19 nt, Artificial Sequence
  Description of Artificial Sequence:  Target sequence/siNA sense region
aucgguccgaguggcuguc

SEQ ID NO: 5 - RNA, 19 nt, Artificial Sequence
  Description of Artificial Sequence:  Target sequence/siNA sense region
cggcucuucagcucucccg

SEQ ID NO: 6 - RNA, 19 nt, Artificial Sequence
  Description of Artificial Sequence:  Target sequence/siNA sense region
gcucggcgucuuccuuccu

SEQ ID NO: 7 - RNA, 19 nt, Artificial Sequence
  Description of Artificial Sequence:  Target sequence/siNA sense region
uccucccggucagcgucgg

SEQ ID NO: 8 - RNA, 19 nt, Artificial Sequence
  Description of Artificial Sequence:  Target sequence/siNA sense region
gcggcugcaccggcggcgg

SEQ ID NO: 9 - RNA, 19 nt, Artificial Sequence
  Description of Artificial Sequence:  Target sequence/siNA sense region
gcgcagucccugcgggagg

SEQ ID NO: 10 - RNA, 19 nt, Artificial Sequence
  Description of Artificial Sequence:  Target sequence/siNA sense region
gggcgacaagagcugagcg

SEQ ID NO: 11 - RNA, 19 nt, Artificial Sequence
  Description of Artificial Sequence:  Target sequence/siNA sense region
ggcggccgccgagcgucga

SEQ ID NO: 12 - RNA, 19 nt, Artificial Sequence
  Description of Artificial Sequence:  Target sequence/siNA sense region
agcucagcgcggcggaggc

SEQ ID NO: 13 - RNA, 19 nt, Artificial Sequence
  Description of Artificial Sequence:  Target sequence/siNA sense region
cggcggcggcccggcagcc

SEQ ID NO: 14 - RNA, 19 nt, Artificial Sequence
  Description of Artificial Sequence:  Target sequence/siNA sense region
caacauggcggcggcggcg

SEQ ID NO: 15 - RNA, 19 nt, Artificial Sequence
  Description of Artificial Sequence:  Target sequence/siNA sense region
ggcggcgggcgcgggcccg

SEQ ID NO: 16 - RNA, 19 nt, Artificial Sequence
  Description of Artificial Sequence:  Target sequence/siNA sense region
ggagaugguccgcgggcag

SEQ ID NO: 17 - RNA, 19 nt, Artificial Sequence
  Description of Artificial Sequence:  Target sequence/siNA sense region
gguguucgacguggggccg

SEQ ID NO: 18 - RNA, 19 nt, Artificial Sequence
  Description of Artificial Sequence:  Target sequence/siNA sense region
gcgcuacaccaaccucucg

SEQ ID NO: 19 - RNA, 19 nt, Artificial Sequence
  Description of Artificial Sequence:  Target sequence/siNA sense region
guacaucggcgagggcgcc

SEQ ID NO: 20 - RNA, 19 nt, Artificial Sequence
  Description of Artificial Sequence:  Target sequence/siNA sense region
cuacggcauggugugcucu

SEQ ID NO: 21 - RNA, 19 nt, Artificial Sequence
  Description of Artificial Sequence:  Target sequence/siNA sense region
ugcuuaugauaaugucaac

SEQ ID NO: 22 - RNA, 19 nt, Artificial Sequence
  Description of Artificial Sequence:  Target sequence/siNA sense region
caaaguucgaguagcuauc

SEQ ID NO: 23 - RNA, 19 nt, Artificial Sequence
  Description of Artificial Sequence:  Target sequence/siNA sense region
caagaaaaucagccccuuu

SEQ ID NO: 24 - RNA, 19 nt, Artificial Sequence
  Description of Artificial Sequence:  Target sequence/siNA sense region
ugagcaccagaccuacugc

SEQ ID NO: 25 - RNA, 19 nt, Artificial Sequence
  Description of Artificial Sequence:  Target sequence/siNA sense region
ccagagaacccugagggag

SEQ ID NO: 26 - RNA, 19 nt, Artificial Sequence
  Description of Artificial Sequence:  Target sequence/siNA sense region
gauaaaaaucuuacugcgc

SEQ ID NO: 27 - RNA, 19 nt, Artificial Sequence
  Description of Artificial Sequence:  Target sequence/siNA sense region
cuucagacaugagaacauc

SEQ ID NO: 28 - RNA, 19 nt, Artificial Sequence
  Description of Artificial Sequence:  Target sequence/siNA sense region
cauuggaaucaaugacauu

SEQ ID NO: 29 - RNA, 19 nt, Artificial Sequence
  Description of Artificial Sequence:  Target sequence/siNA sense region
uauucgagcaccaaccauc

SEQ ID NO: 30 - RNA, 19 nt, Artificial Sequence
  Description of Artificial Sequence:  Target sequence/siNA sense region
cgagcaaaugaaagaugua

SEQ ID NO: 31 - RNA, 19 nt, Artificial Sequence
  Description of Artificial Sequence:  Target sequence/siNA sense region
auauauaguacaggaccuc

SEQ ID NO: 32 - RNA, 19 nt, Artificial Sequence
  Description of Artificial Sequence:  Target sequence/siNA sense region
cauggaaacagaucuuuac

SEQ ID NO: 33 - RNA, 19 nt, Artificial Sequence
  Description of Artificial Sequence:  Target sequence/siNA sense region
caagcucuugaagacacaa

SEQ ID NO: 34 - RNA, 19 nt, Artificial Sequence
  Description of Artificial Sequence:  Target sequence/siNA sense region
acaccucagcaaugaccau

SEQ ID NO: 35 - RNA, 19 nt, Artificial Sequence
  Description of Artificial Sequence:  Target sequence/siNA sense region
uaucugcuauuuucucuac

SEQ ID NO: 36 - RNA, 19 nt, Artificial Sequence
  Description of Artificial Sequence:  Target sequence/siNA sense region
ccagauccucagaggguua

SEQ ID NO: 37 - RNA, 19 nt, Artificial Sequence
  Description of Artificial Sequence:  Target sequence/siNA sense region
aaaauauauccauucagcu

SEQ ID NO: 38 - RNA, 19 nt, Artificial Sequence
  Description of Artificial Sequence:  Target sequence/siNA sense region
uaacguucugcaccgugac

SEQ ID NO: 39 - RNA, 19 nt, Artificial Sequence
  Description of Artificial Sequence:  Target sequence/siNA sense region
ccucaagccuuccaaccug

SEQ ID NO: 40 - RNA, 19 nt, Artificial Sequence
  Description of Artificial Sequence:  Target sequence/siNA sense region
gcugcucaacaccaccugu

SEQ ID NO: 41 - RNA, 19 nt, Artificial Sequence
  Description of Artificial Sequence:  Target sequence/siNA sense region
ugaucucaagaucugugac

SEQ ID NO: 42 - RNA, 19 nt, Artificial Sequence
  Description of Artificial Sequence:  Target sequence/siNA sense region
cuuuggccuggcccguguu

SEQ ID NO: 43 - RNA, 19 nt, Artificial Sequence
  Description of Artificial Sequence:  Target sequence/siNA sense region
ugcagauccagaccaugau

SEQ ID NO: 44 - RNA, 19 nt, Artificial Sequence
  Description of Artificial Sequence:  Target sequence/siNA sense region
ucacacaggguuccugaca

SEQ ID NO: 45 - RNA, 19 nt, Artificial Sequence
  Description of Artificial Sequence:  Target sequence/siNA sense region
agaauauguggccacacgu

SEQ ID NO: 46 - RNA, 19 nt, Artificial Sequence
  Description of Artificial Sequence:  Target sequence/siNA sense region
uugguacagggcuccagaa

SEQ ID NO: 47 - RNA, 19 nt, Artificial Sequence
  Description of Artificial Sequence:  Target sequence/siNA sense region
aauuauguugaauuccaag

SEQ ID NO: 48 - RNA, 19 nt, Artificial Sequence
  Description of Artificial Sequence:  Target sequence/siNA sense region
gggcuacaccaaguccauu

SEQ ID NO: 49 - RNA, 19 nt, Artificial Sequence
  Description of Artificial Sequence:  Target sequence/siNA sense region
ugauauuuggucuguaggc

SEQ ID NO: 50 - RNA, 19 nt, Artificial Sequence
  Description of Artificial Sequence:  Target sequence/siNA sense region
cugcauucuggcagaaaug

SEQ ID NO: 51 - RNA, 19 nt, Artificial Sequence
  Description of Artificial Sequence:  Target sequence/siNA sense region
gcuuucuaacaggcccauc

SEQ ID NO: 52 - RNA, 19 nt, Artificial Sequence
  Description of Artificial Sequence:  Target sequence/siNA sense region
cuuuccagggaagcauuau

SEQ ID NO: 53 - RNA, 19 nt, Artificial Sequence
  Description of Artificial Sequence:  Target sequence/siNA sense region
ucuugaccagcugaaacac

SEQ ID NO: 54 - RNA, 19 nt, Artificial Sequence
  Description of Artificial Sequence:  Target sequence/siNA sense region
cauuuuggguauucuugga

SEQ ID NO: 55 - RNA, 19 nt, Artificial Sequence
  Description of Artificial Sequence:  Target sequence/siNA sense region
auccccaucacaagaagac

SEQ ID NO: 56 - RNA, 19 nt, Artificial Sequence
  Description of Artificial Sequence:  Target sequence/siNA sense region
ccugaauuguauaauaaau

SEQ ID NO: 57 - RNA, 19 nt, Artificial Sequence
  Description of Artificial Sequence:  Target sequence/siNA sense region
uuuaaaagcuaggaacuau

SEQ ID NO: 58 - RNA, 19 nt, Artificial Sequence
  Description of Artificial Sequence:  Target sequence/siNA sense region
uuugcuuucucuuccacac

SEQ ID NO: 59 - RNA, 19 nt, Artificial Sequence
  Description of Artificial Sequence:  Target sequence/siNA sense region
caaaaauaaggugccaugg

SEQ ID NO: 60 - RNA, 19 nt, Artificial Sequence
  Description of Artificial Sequence:  Target sequence/siNA sense region
gaacaggcuguucccaaau

SEQ ID NO: 61 - RNA, 19 nt, Artificial Sequence
  Description of Artificial Sequence:  Target sequence/siNA sense region
ugcugacuccaaagcucug

SEQ ID NO: 62 - RNA, 19 nt, Artificial Sequence
  Description of Artificial Sequence:  Target sequence/siNA sense region
ggacuuauuggacaaaaug

SEQ ID NO: 63 - RNA, 19 nt, Artificial Sequence
  Description of Artificial Sequence:  Target sequence/siNA sense region
guugacauucaacccacac

SEQ ID NO: 64 - RNA, 19 nt, Artificial Sequence
  Description of Artificial Sequence:  Target sequence/siNA sense region
caagaggauugaaguagaa

SEQ ID NO: 65 - RNA, 19 nt, Artificial Sequence
  Description of Artificial Sequence:  Target sequence/siNA sense region
acaggcucuggcccaccca

SEQ ID NO: 66 - RNA, 19 nt, Artificial Sequence
  Description of Artificial Sequence:  Target sequence/siNA sense region
auaucuggagcaguauuac

SEQ ID NO: 67 - RNA, 19 nt, Artificial Sequence
  Description of Artificial Sequence:  Target sequence/siNA sense region
cgacccgagugacgagccc

SEQ ID NO: 68 - RNA, 19 nt, Artificial Sequence
  Description of Artificial Sequence:  Target sequence/siNA sense region
caucgccgaagcaccauuc

SEQ ID NO: 69 - RNA, 19 nt, Artificial Sequence
  Description of Artificial Sequence:  Target sequence/siNA sense region
caaguucgacauggaauug

SEQ ID NO: 70 - RNA, 19 nt, Artificial Sequence
  Description of Artificial Sequence:  Target sequence/siNA sense region
ggaugacuugccuaaggaa

SEQ ID NO: 71 - RNA, 19 nt, Artificial Sequence
  Description of Artificial Sequence:  Target sequence/siNA sense region
aaagcucaaagaacuaauu

SEQ ID NO: 72 - RNA, 19 nt, Artificial Sequence
  Description of Artificial Sequence:  Target sequence/siNA sense region
uuuugaagagacugcuaga

SEQ ID NO: 73 - RNA, 19 nt, Artificial Sequence
  Description of Artificial Sequence:  Target sequence/siNA sense region
auuccagccaggauacaga

SEQ ID NO: 74 - RNA, 19 nt, Artificial Sequence
  Description of Artificial Sequence:  Target sequence/siNA sense region
aucuuaaauuugucaggac

SEQ ID NO: 75 - RNA, 19 nt, Artificial Sequence
  Description of Artificial Sequence:  Target sequence/siNA sense region
caagggcucagaggacugg

SEQ ID NO: 76 - RNA, 19 nt, Artificial Sequence
  Description of Artificial Sequence:  Target sequence/siNA sense region
gacgugcucagacaucggu

SEQ ID NO: 77 - RNA, 19 nt, Artificial Sequence
  Description of Artificial Sequence:  Target sequence/siNA sense region
uguucuucuucccaguucu

SEQ ID NO: 78 - RNA, 19 nt, Artificial Sequence
  Description of Artificial Sequence:  Target sequence/siNA sense region
uugaccccugguccugucu

SEQ ID NO: 79 - RNA, 19 nt, Artificial Sequence
  Description of Artificial Sequence:  Target sequence/siNA sense region
uccagcccgucuuggcuua

SEQ ID NO: 80 - RNA, 19 nt, Artificial Sequence
  Description of Artificial Sequence:  Target sequence/siNA sense region
auccacuuugacuccuuug

SEQ ID NO: 81 - RNA, 19 nt, Artificial Sequence
  Description of Artificial Sequence:  Target sequence/siNA sense region
gagccguuuggaggggcgg

SEQ ID NO: 82 - RNA, 19 nt, Artificial Sequence
  Description of Artificial Sequence:  Target sequence/siNA sense region
guuucugguaguuguggcu

SEQ ID NO: 83 - RNA, 19 nt, Artificial Sequence
  Description of Artificial Sequence:  Target sequence/siNA sense region
uuuuaugcuuucaaagaau

SEQ ID NO: 84 - RNA, 19 nt, Artificial Sequence
  Description of Artificial Sequence:  Target sequence/siNA sense region
uuucuucaguccagagaau

SEQ ID NO: 85 - RNA, 19 nt, Artificial Sequence
  Description of Artificial Sequence:  Target sequence/siNA sense region
uuccuccuggcagcccugu

SEQ ID NO: 86 - RNA, 19 nt, Artificial Sequence
  Description of Artificial Sequence:  Target sequence/siNA sense region
ugugugucacccauuggug

SEQ ID NO: 87 - RNA, 19 nt, Artificial Sequence
  Description of Artificial Sequence:  Target sequence/siNA sense region
gaccugcggcaguauguac

SEQ ID NO: 88 - RNA, 19 nt, Artificial Sequence
  Description of Artificial Sequence:  Target sequence/siNA sense region
cuucagugcaccuuacugc

SEQ ID NO: 89 - RNA, 19 nt, Artificial Sequence
  Description of Artificial Sequence:  Target sequence/siNA sense region
cuuacuguugcuuuaguca

SEQ ID NO: 90 - RNA, 19 nt, Artificial Sequence
  Description of Artificial Sequence:  Target sequence/siNA sense region
acuaauugcuuucugguuu

SEQ ID NO: 91 - RNA, 19 nt, Artificial Sequence
  Description of Artificial Sequence:  Target sequence/siNA sense region
ugaaagaugcagugguucc

SEQ ID NO: 92 - RNA, 19 nt, Artificial Sequence
  Description of Artificial Sequence:  Target sequence/siNA sense region
cucccucuccugaauccuu

SEQ ID NO: 93 - RNA, 19 nt, Artificial Sequence
  Description of Artificial Sequence:  Target sequence/siNA sense region
uuucuacaugaugcccugc

SEQ ID NO: 94 - RNA, 19 nt, Artificial Sequence
  Description of Artificial Sequence:  Target sequence/siNA sense region
cugaccaugcagccgcacc

SEQ ID NO: 95 - RNA, 19 nt, Artificial Sequence
  Description of Artificial Sequence:  Target sequence/siNA sense region
cagagagagauucuucccc

SEQ ID NO: 96 - RNA, 19 nt, Artificial Sequence
  Description of Artificial Sequence:  Target sequence/siNA sense region
caauuggcucuagucacug

SEQ ID NO: 97 - RNA, 19 nt, Artificial Sequence
  Description of Artificial Sequence:  Target sequence/siNA sense region
ggcaucucacuuuaugaua

SEQ ID NO: 98 - RNA, 19 nt, Artificial Sequence
  Description of Artificial Sequence:  Target sequence/siNA sense region
agggaaggcuacuaccuag

SEQ ID NO: 99 - RNA, 19 nt, Artificial Sequence
  Description of Artificial Sequence:  Target sequence/siNA sense region
gggcacuuuaagucaguga

SEQ ID NO: 100 - RNA, 19 nt, Artificial Sequence
  Description of Artificial Sequence:  Target sequence/siNA sense region
acagccccuuauuugcacu

SEQ ID NO: 101 - RNA, 19 nt, Artificial Sequence
  Description of Artificial Sequence:  Target sequence/siNA sense region
uucaccuuuugaccauaac

SEQ ID NO: 102 - RNA, 19 nt, Artificial Sequence
  Description of Artificial Sequence:  Target sequence/siNA sense region
cuguuuccccagagcagga

SEQ ID NO: 103 - RNA, 19 nt, Artificial Sequence
  Description of Artificial Sequence:  Target sequence/siNA sense region
agcuuguggaaauaccuug

SEQ ID NO: 104 - RNA, 19 nt, Artificial Sequence
  Description of Artificial Sequence:  Target sequence/siNA sense region
ggcugauguugcagccugc

SEQ ID NO: 105 - RNA, 19 nt, Artificial Sequence
  Description of Artificial Sequence:  Target sequence/siNA sense region
cagcaagugcuuccgucuc

SEQ ID NO: 106 - RNA, 19 nt, Artificial Sequence
  Description of Artificial Sequence:  Target sequence/siNA sense region
ccggaauccuuggggagca

SEQ ID NO: 107 - RNA, 19 nt, Artificial Sequence
  Description of Artificial Sequence:  Target sequence/siNA sense region
acuuguccacgucuuuucu

SEQ ID NO: 108 - RNA, 19 nt, Artificial Sequence
  Description of Artificial Sequence:  Target sequence/siNA sense region
ucauaucaugguagucacu

SEQ ID NO: 109 - RNA, 19 nt, Artificial Sequence
  Description of Artificial Sequence:  Target sequence/siNA sense region
uaacauauauaagguaugu

SEQ ID NO: 110 - RNA, 19 nt, Artificial Sequence
  Description of Artificial Sequence:  Target sequence/siNA sense region
ugcuauuggcccagcuuuu

SEQ ID NO: 111 - RNA, 19 nt, Artificial Sequence
  Description of Artificial Sequence:  Target sequence/siNA sense region
uagaaaaugcagucauuuu

SEQ ID NO: 112 - RNA, 19 nt, Artificial Sequence
  Description of Artificial Sequence:  Target sequence/siNA sense region
uucuaaauaaaaaggaagu

SEQ ID NO: 113 - RNA, 19 nt, Artificial Sequence
  Description of Artificial Sequence:  Target sequence/siNA sense region
uacugcacccagcaguguc

SEQ ID NO: 114 - RNA, 19 nt, Artificial Sequence
  Description of Artificial Sequence:  Target sequence/siNA sense region
cacucuguaguuacugugg

SEQ ID NO: 115 - RNA, 19 nt, Artificial Sequence
  Description of Artificial Sequence:  Target sequence/siNA sense region
gucacuuguaccauauaga

SEQ ID NO: 116 - RNA, 19 nt, Artificial Sequence
  Description of Artificial Sequence:  Target sequence/siNA sense region
agguguaacacuugucaag

SEQ ID NO: 117 - RNA, 19 nt, Artificial Sequence
  Description of Artificial Sequence:  Target sequence/siNA sense region
gaagcguuaugugcaguac

SEQ ID NO: 118 - RNA, 19 nt, Artificial Sequence
  Description of Artificial Sequence:  Target sequence/siNA sense region
cuuaauguuuguaagacuu

SEQ ID NO: 119 - RNA, 19 nt, Artificial Sequence
  Description of Artificial Sequence:  Target sequence/siNA sense region
uacaaaaaaagauuuaaag

SEQ ID NO: 120 - RNA, 19 nt, Artificial Sequence
  Description of Artificial Sequence:  Target sequence/siNA sense region
guggcagcuucacucgaca

SEQ ID NO: 121 - RNA, 19 nt, Artificial Sequence
  Description of Artificial Sequence:  Target sequence/siNA sense region
auuuggugagagaaguaca

SEQ ID NO: 122 - RNA, 19 nt, Artificial Sequence
  Description of Artificial Sequence:  Target sequence/siNA sense region
aaagguugcagugcugagc

SEQ ID NO: 123 - RNA, 19 nt, Artificial Sequence
  Description of Artificial Sequence:  Target sequence/siNA sense region
cugugggcgguuucugggg

SEQ ID NO: 124 - RNA, 19 nt, Artificial Sequence
  Description of Artificial Sequence:  Target sequence/siNA sense region
gaugucccaggguggaacu

SEQ ID NO: 125 - RNA, 19 nt, Artificial Sequence
  Description of Artificial Sequence:  Target sequence/siNA sense region
uccacaugcuggugcauau

SEQ ID NO: 126 - RNA, 19 nt, Artificial Sequence
  Description of Artificial Sequence:  Target sequence/siNA sense region
uacgcccuugagcuacuuc

SEQ ID NO: 127 - RNA, 19 nt, Artificial Sequence
  Description of Artificial Sequence:  Target sequence/siNA sense region
caaaugugguuuauaccuc

SEQ ID NO: 128 - RNA, 19 nt, Artificial Sequence
  Description of Artificial Sequence:  Target sequence/siNA sense region
cgcagauacaagaaucuuu

SEQ ID NO: 129 - RNA, 19 nt, Artificial Sequence
  Description of Artificial Sequence:  Target sequence/siNA sense region
uaugaauauacaauucuuu

SEQ ID NO: 130 - RNA, 19 nt, Artificial Sequence
  Description of Artificial Sequence:  Target sequence/siNA sense region
uuuccuucuacagcuuagc

SEQ ID NO: 131 - RNA, 19 nt, Artificial Sequence
  Description of Artificial Sequence:  Target sequence/siNA sense region
cuccgucuuuucaaccacg

SEQ ID NO: 132 - RNA, 19 nt, Artificial Sequence
  Description of Artificial Sequence:  Target sequence/siNA sense region
gaacauuuaaaacccgacc

SEQ ID NO: 133 - RNA, 19 nt, Artificial Sequence
  Description of Artificial Sequence:  Target sequence/siNA sense region
cuacuagcacuguucuguc

SEQ ID NO: 134 - RNA, 19 nt, Artificial Sequence
  Description of Artificial Sequence:  Target sequence/siNA sense region
ccucaaguacucaaauauu

SEQ ID NO: 135 - RNA, 19 nt, Artificial Sequence
  Description of Artificial Sequence:  Target sequence/siNA sense region
uucugauacugcugaguca

SEQ ID NO: 136 - RNA, 19 nt, Artificial Sequence
  Description of Artificial Sequence:  Target sequence/siNA sense region
agacugucagaaaaagcua

SEQ ID NO: 137 - RNA, 19 nt, Artificial Sequence
  Description of Artificial Sequence:  Target sequence/siNA sense region
agcacuaacucguguuugg

SEQ ID NO: 138 - RNA, 19 nt, Artificial Sequence
  Description of Artificial Sequence:  Target sequence/siNA sense region
gagcucuauccauauuuua

SEQ ID NO: 139 - RNA, 19 nt, Artificial Sequence
  Description of Artificial Sequence:  Target sequence/siNA sense region
acugaucucuuuaaguauu

SEQ ID NO: 140 - RNA, 19 nt, Artificial Sequence
  Description of Artificial Sequence:  Target sequence/siNA sense region
uuguuccugccacugugua

SEQ ID NO: 141 - RNA, 19 nt, Artificial Sequence
  Description of Artificial Sequence:  Target sequence/siNA sense region
acuguggaguugacucggu

SEQ ID NO: 142 - RNA, 19 nt, Artificial Sequence
  Description of Artificial Sequence:  Target sequence/siNA sense region
uguucugucccagugcggu

SEQ ID NO: 143 - RNA, 19 nt, Artificial Sequence
  Description of Artificial Sequence:  Target sequence/siNA sense region
ugccuccucuugacuuccc

SEQ ID NO: 144 - RNA, 19 nt, Artificial Sequence
  Description of Artificial Sequence:  Target sequence/siNA sense region
ccacugcucucugugguga

SEQ ID NO: 145 - RNA, 19 nt, Artificial Sequence
  Description of Artificial Sequence:  Target sequence/siNA sense region
agaaauuugccuuguucaa

SEQ ID NO: 146 - RNA, 19 nt, Artificial Sequence
  Description of Artificial Sequence:  Target sequence/siNA sense region
auaauuacuguacccucgc

SEQ ID NO: 147 - RNA, 19 nt, Artificial Sequence
  Description of Artificial Sequence:  Target sequence/siNA sense region
caugacuguuacagcuuuc

SEQ ID NO: 148 - RNA, 19 nt, Artificial Sequence
  Description of Artificial Sequence:  Target sequence/siNA sense region
cugugcagagaugacuguc

SEQ ID NO: 149 - RNA, 19 nt, Artificial Sequence
  Description of Artificial Sequence:  Target sequence/siNA sense region
ccaagugccacaugccuac

SEQ ID NO: 150 - RNA, 19 nt, Artificial Sequence
  Description of Artificial Sequence:  Target sequence/siNA sense region
cgauugaaaugaaaacucu

SEQ ID NO: 151 - RNA, 19 nt, Artificial Sequence
  Description of Artificial Sequence:  Target sequence/siNA sense region
uauuguuaccucugaguug

SEQ ID NO: 152 - RNA, 19 nt, Artificial Sequence
  Description of Artificial Sequence:  Target sequence/siNA sense region
guguuccacggaaaaugcu

SEQ ID NO: 153 - RNA, 19 nt, Artificial Sequence
  Description of Artificial Sequence:  Target sequence/siNA sense region
uauccagcagaucauuuag

SEQ ID NO: 154 - RNA, 19 nt, Artificial Sequence
  Description of Artificial Sequence:  Target sequence/siNA sense region
ggaaaaauaauucuauuuu

SEQ ID NO: 155 - RNA, 19 nt, Artificial Sequence
  Description of Artificial Sequence:  Target sequence/siNA sense region
uuagcuuuucauuucucag

SEQ ID NO: 156 - RNA, 19 nt, Artificial Sequence
  Description of Artificial Sequence:  Target sequence/siNA sense region
gcuguccuuuuuucuuguu

SEQ ID NO: 157 - RNA, 19 nt, Artificial Sequence
  Description of Artificial Sequence:  Target sequence/siNA sense region
uugauuuuugacagcaaug

SEQ ID NO: 158 - RNA, 19 nt, Artificial Sequence
  Description of Artificial Sequence:  Target sequence/siNA sense region
ggagaauggguuauauaaa

SEQ ID NO: 159 - RNA, 19 nt, Artificial Sequence
  Description of Artificial Sequence:  Target sequence/siNA sense region
agacugccugcuaauauga

SEQ ID NO: 160 - RNA, 19 nt, Artificial Sequence
  Description of Artificial Sequence:  Target sequence/siNA sense region
aacagaaaugcauuuguaa

SEQ ID NO: 161 - RNA, 19 nt, Artificial Sequence
  Description of Artificial Sequence:  Target sequence/siNA sense region
auucaugaaaauaaaugua

SEQ ID NO: 162 - RNA, 19 nt, Artificial Sequence
  Description of Artificial Sequence:  Target sequence/siNA sense region
acaucuucuaucuucaaaa

SEQ ID NO: 163 - RNA, 19 nt, Artificial Sequence
  Description of Artificial Sequence:  Target sequence/siNA sense region
uucaaaaaaaaaaaaaaaa

SEQ ID NO: 164 - RNA, 19 nt, Artificial Sequence
  Description of Artificial Sequence:  siNA antisense region
cgggcgggcggagggaggg

SEQ ID NO: 165 - RNA, 19 nt, Artificial Sequence
  Description of Artificial Sequence:  siNA antisense region
gacugacgggcgggccggc

SEQ ID NO: 166 - RNA, 19 nt, Artificial Sequence
  Description of Artificial Sequence:  siNA antisense region
uugccugccugccugccag

SEQ ID NO: 167 - RNA, 19 nt, Artificial Sequence
  Description of Artificial Sequence:  siNA antisense region
gacagccacucggaccgau

SEQ ID NO: 168 - RNA, 19 nt, Artificial Sequence
  Description of Artificial Sequence:  siNA antisense region
cgggagagcugaagagccg

SEQ ID NO: 169 - RNA, 19 nt, Artificial Sequence
  Description of Artificial Sequence:  siNA antisense region
aggaaggaagacgccgagc

SEQ ID NO: 170 - RNA, 19 nt, Artificial Sequence
  Description of Artificial Sequence:  siNA antisense region
ccgacgcugaccgggagga

SEQ ID NO: 171 - RNA, 19 nt, Artificial Sequence
  Description of Artificial Sequence:  siNA antisense region
ccgccgccggugcagccgc

SEQ ID NO: 172 - RNA, 19 nt, Artificial Sequence
  Description of Artificial Sequence:  siNA antisense region
ccucccgcagggacugcgc

SEQ ID NO: 173 - RNA, 19 nt, Artificial Sequence
  Description of Artificial Sequence:  siNA antisense region
cgcucagcucuugucgccc

SEQ ID NO: 174 - RNA, 19 nt, Artificial Sequence
  Description of Artificial Sequence:  siNA antisense region
ucgacgcucggcggccgcc

SEQ ID NO: 175 - RNA, 19 nt, Artificial Sequence
  Description of Artificial Sequence:  siNA antisense region
gccuccgccgcgcugagcu

SEQ ID NO: 176 - RNA, 19 nt, Artificial Sequence
  Description of Artificial Sequence:  siNA antisense region
ggcugccgggccgccgccg

SEQ ID NO: 177 - RNA, 19 nt, Artificial Sequence
  Description of Artificial Sequence:  siNA antisense region
cgccgccgccgccauguug

SEQ ID NO: 178 - RNA, 19 nt, Artificial Sequence
  Description of Artificial Sequence:  siNA antisense region
cgggcccgcgcccgccgcc

SEQ ID NO: 179 - RNA, 19 nt, Artificial Sequence
  Description of Artificial Sequence:  siNA antisense region
cugcccgcggaccaucucc

SEQ ID NO: 180 - RNA, 19 nt, Artificial Sequence
  Description of Artificial Sequence:  siNA antisense region
cggccccacgucgaacacc

SEQ ID NO: 181 - RNA, 19 nt, Artificial Sequence
  Description of Artificial Sequence:  siNA antisense region
cgagagguugguguagcgc

SEQ ID NO: 182 - RNA, 19 nt, Artificial Sequence
  Description of Artificial Sequence:  siNA antisense region
ggcgcccucgccgauguac

SEQ ID NO: 183 - RNA, 19 nt, Artificial Sequence
  Description of Artificial Sequence:  siNA antisense region
agagcacaccaugccguag

SEQ ID NO: 184 - RNA, 19 nt, Artificial Sequence
  Description of Artificial Sequence:  siNA antisense region
guugacauuaucauaagca

SEQ ID NO: 185 - RNA, 19 nt, Artificial Sequence
  Description of Artificial Sequence:  siNA antisense region
gauagcuacucgaacuuug

SEQ ID NO: 186 - RNA, 19 nt, Artificial Sequence
  Description of Artificial Sequence:  siNA antisense region
aaaggggcugauuuucuug

SEQ ID NO: 187 - RNA, 19 nt, Artificial Sequence
  Description of Artificial Sequence:  siNA antisense region
gcaguaggucuggugcuca

SEQ ID NO: 188 - RNA, 19 nt, Artificial Sequence
  Description of Artificial Sequence:  siNA antisense region
cucccucaggguucucugg

SEQ ID NO: 189 - RNA, 19 nt, Artificial Sequence
  Description of Artificial Sequence:  siNA antisense region
gcgcaguaagauuuuuauc

SEQ ID NO: 190 - RNA, 19 nt, Artificial Sequence
  Description of Artificial Sequence:  siNA antisense region
gauguucucaugucugaag

SEQ ID NO: 191 - RNA, 19 nt, Artificial Sequence
  Description of Artificial Sequence:  siNA antisense region
aaugucauugauuccaaug

SEQ ID NO: 192 - RNA, 19 nt, Artificial Sequence
  Description of Artificial Sequence:  siNA antisense region
gaugguuggugcucgaaua

SEQ ID NO: 193 - RNA, 19 nt, Artificial Sequence
  Description of Artificial Sequence:  siNA antisense region
uacaucuuucauuugcucg

SEQ ID NO: 194 - RNA, 19 nt, Artificial Sequence
  Description of Artificial Sequence:  siNA antisense region
gagguccuguacuauauau

SEQ ID NO: 195 - RNA, 19 nt, Artificial Sequence
  Description of Artificial Sequence:  siNA antisense region
guaaagaucuguuuccaug

SEQ ID NO: 196 - RNA, 19 nt, Artificial Sequence
  Description of Artificial Sequence:  siNA antisense region
uugugucuucaagagcuug

SEQ ID NO: 197 - RNA, 19 nt, Artificial Sequence
  Description of Artificial Sequence:  siNA antisense region
auggucauugcugaggugu

SEQ ID NO: 198 - RNA, 19 nt, Artificial Sequence
  Description of Artificial Sequence:  siNA antisense region
guagagaaaauagcagaua

SEQ ID NO: 199 - RNA, 19 nt, Artificial Sequence
  Description of Artificial Sequence:  siNA antisense region
uaacccucugaggaucugg

SEQ ID NO: 200 - RNA, 19 nt, Artificial Sequence
  Description of Artificial Sequence:  siNA antisense region
agcugaauggauauauuuu

SEQ ID NO: 201 - RNA, 19 nt, Artificial Sequence
  Description of Artificial Sequence:  siNA antisense region
gucacggugcagaacguua

SEQ ID NO: 202 - RNA, 19 nt, Artificial Sequence
  Description of Artificial Sequence:  siNA antisense region
cagguuggaaggcuugagg

SEQ ID NO: 203 - RNA, 19 nt, Artificial Sequence
  Description of Artificial Sequence:  siNA antisense region
acaggugguguugagcagc

SEQ ID NO: 204 - RNA, 19 nt, Artificial Sequence
  Description of Artificial Sequence:  siNA antisense region
gucacagaucuugagauca

SEQ ID NO: 205 - RNA, 19 nt, Artificial Sequence
  Description of Artificial Sequence:  siNA antisense region
aacacgggccaggccaaag

SEQ ID NO: 206 - RNA, 19 nt, Artificial Sequence
  Description of Artificial Sequence:  siNA antisense region
aucauggucuggaucugca

SEQ ID NO: 207 - RNA, 19 nt, Artificial Sequence
  Description of Artificial Sequence:  siNA antisense region
ugucaggaacccuguguga

SEQ ID NO: 208 - RNA, 19 nt, Artificial Sequence
  Description of Artificial Sequence:  siNA antisense region
acguguggccacauauucu

SEQ ID NO: 209 - RNA, 19 nt, Artificial Sequence
  Description of Artificial Sequence:  siNA antisense region
uucuggagcccuguaccaa

SEQ ID NO: 210 - RNA, 19 nt, Artificial Sequence
  Description of Artificial Sequence:  siNA antisense region
cuuggaauucaacauaauu

SEQ ID NO: 211 - RNA, 19 nt, Artificial Sequence
  Description of Artificial Sequence:  siNA antisense region
aauggacuugguguagccc

SEQ ID NO: 212 - RNA, 19 nt, Artificial Sequence
  Description of Artificial Sequence:  siNA antisense region
gccuacagaccaaauauca

SEQ ID NO: 213 - RNA, 19 nt, Artificial Sequence
  Description of Artificial Sequence:  siNA antisense region
cauuucugccagaaugcag

SEQ ID NO: 214 - RNA, 19 nt, Artificial Sequence
  Description of Artificial Sequence:  siNA antisense region
gaugggccuguuagaaagc

SEQ ID NO: 215 - RNA, 19 nt, Artificial Sequence
  Description of Artificial Sequence:  siNA antisense region
auaaugcuucccuggaaag

SEQ ID NO: 216 - RNA, 19 nt, Artificial Sequence
  Description of Artificial Sequence:  siNA antisense region
guguuucagcuggucaaga

SEQ ID NO: 217 - RNA, 19 nt, Artificial Sequence
  Description of Artificial Sequence:  siNA antisense region
uccaagaauacccaaaaug

SEQ ID NO: 218 - RNA, 19 nt, Artificial Sequence
  Description of Artificial Sequence:  siNA antisense region
gucuucuugugauggggau

SEQ ID NO: 219 - RNA, 19 nt, Artificial Sequence
  Description of Artificial Sequence:  siNA antisense region
auuuauuauacaauucagg

SEQ ID NO: 220 - RNA, 19 nt, Artificial Sequence
  Description of Artificial Sequence:  siNA antisense region
auaguuccuagcuuuuaaa

SEQ ID NO: 221 - RNA, 19 nt, Artificial Sequence
  Description of Artificial Sequence:  siNA antisense region
guguggaagagaaagcaaa

SEQ ID NO: 222 - RNA, 19 nt, Artificial Sequence
  Description of Artificial Sequence:  siNA antisense region
ccauggcaccuuauuuuug

SEQ ID NO: 223 - RNA, 19 nt, Artificial Sequence
  Description of Artificial Sequence:  siNA antisense region
auuugggaacagccuguuc

SEQ ID NO: 224 - RNA, 19 nt, Artificial Sequence
  Description of Artificial Sequence:  siNA antisense region
cagagcuuuggagucagca

SEQ ID NO: 225 - RNA, 19 nt, Artificial Sequence
  Description of Artificial Sequence:  siNA antisense region
cauuuuguccaauaagucc

SEQ ID NO: 226 - RNA, 19 nt, Artificial Sequence
  Description of Artificial Sequence:  siNA antisense region
guguggguugaaugucaac

SEQ ID NO: 227 - RNA, 19 nt, Artificial Sequence
  Description of Artificial Sequence:  siNA antisense region
uucuacuucaauccucuug

SEQ ID NO: 228 - RNA, 19 nt, Artificial Sequence
  Description of Artificial Sequence:  siNA antisense region
ugggugggccagagccugu

SEQ ID NO: 229 - RNA, 19 nt, Artificial Sequence
  Description of Artificial Sequence:  siNA antisense region
guaauacugcuccagauau

SEQ ID NO: 230 - RNA, 19 nt, Artificial Sequence
  Description of Artificial Sequence:  siNA antisense region
gggcucgucacucgggucg

SEQ ID NO: 231 - RNA, 19 nt, Artificial Sequence
  Description of Artificial Sequence:  siNA antisense region
gaauggugcuucggcgaug

SEQ ID NO: 232 - RNA, 19 nt, Artificial Sequence
  Description of Artificial Sequence:  siNA antisense region
caauuccaugucgaacuug

SEQ ID NO: 233 - RNA, 19 nt, Artificial Sequence
  Description of Artificial Sequence:  siNA antisense region
uuccuuaggcaagucaucc

SEQ ID NO: 234 - RNA, 19 nt, Artificial Sequence
  Description of Artificial Sequence:  siNA antisense region
aauuaguucuuugagcuuu

SEQ ID NO: 235 - RNA, 19 nt, Artificial Sequence
  Description of Artificial Sequence:  siNA antisense region
ucuagcagucucuucaaaa

SEQ ID NO: 236 - RNA, 19 nt, Artificial Sequence
  Description of Artificial Sequence:  siNA antisense region
ucuguauccuggcuggaau

SEQ ID NO: 237 - RNA, 19 nt, Artificial Sequence
  Description of Artificial Sequence:  siNA antisense region
guccugacaaauuuaagau

SEQ ID NO: 238 - RNA, 19 nt, Artificial Sequence
  Description of Artificial Sequence:  siNA antisense region
ccaguccucugagcccuug

SEQ ID NO: 239 - RNA, 19 nt, Artificial Sequence
  Description of Artificial Sequence:  siNA antisense region
accgaugucugagcacguc

SEQ ID NO: 240 - RNA, 19 nt, Artificial Sequence
  Description of Artificial Sequence:  siNA antisense region
agaacugggaagaagaaca

SEQ ID NO: 241 - RNA, 19 nt, Artificial Sequence
  Description of Artificial Sequence:  siNA antisense region
agacaggaccaggggucaa

SEQ ID NO: 242 - RNA, 19 nt, Artificial Sequence
  Description of Artificial Sequence:  siNA antisense region
uaagccaagacgggcugga

SEQ ID NO: 243 - RNA, 19 nt, Artificial Sequence
  Description of Artificial Sequence:  siNA antisense region
caaaggagucaaaguggau

SEQ ID NO: 244 - RNA, 19 nt, Artificial Sequence
  Description of Artificial Sequence:  siNA antisense region
ccgccccuccaaacggcuc

SEQ ID NO: 245 - RNA, 19 nt, Artificial Sequence
  Description of Artificial Sequence:  siNA antisense region
agccacaacuaccagaaac

SEQ ID NO: 246 - RNA, 19 nt, Artificial Sequence
  Description of Artificial Sequence:  siNA antisense region
auucuuugaaagcauaaaa

SEQ ID NO: 247 - RNA, 19 nt, Artificial Sequence
  Description of Artificial Sequence:  siNA antisense region
auucucuggacugaagaaa

SEQ ID NO: 248 - RNA, 19 nt, Artificial Sequence
  Description of Artificial Sequence:  siNA antisense region
acagggcugccaggaggaa

SEQ ID NO: 249 - RNA, 19 nt, Artificial Sequence
  Description of Artificial Sequence:  siNA antisense region
caccaaugggugacacaca

SEQ ID NO: 250 - RNA, 19 nt, Artificial Sequence
  Description of Artificial Sequence:  siNA antisense region
guacauacugccgcagguc

SEQ ID NO: 251 - RNA, 19 nt, Artificial Sequence
  Description of Artificial Sequence:  siNA antisense region
gcaguaaggugcacugaag

SEQ ID NO: 252 - RNA, 19 nt, Artificial Sequence
  Description of Artificial Sequence:  siNA antisense region
ugacuaaagcaacaguaag

SEQ ID NO: 253 - RNA, 19 nt, Artificial Sequence
  Description of Artificial Sequence:  siNA antisense region
aaaccagaaagcaauuagu

SEQ ID NO: 254 - RNA, 19 nt, Artificial Sequence
  Description of Artificial Sequence:  siNA antisense region
ggaaccacugcaucuuuca

SEQ ID NO: 255 - RNA, 19 nt, Artificial Sequence
  Description of Artificial Sequence:  siNA antisense region
aaggauucaggagagggag

SEQ ID NO: 256 - RNA, 19 nt, Artificial Sequence
  Description of Artificial Sequence:  siNA antisense region
gcagggcaucauguagaaa

SEQ ID NO: 257 - RNA, 19 nt, Artificial Sequence
  Description of Artificial Sequence:  siNA antisense region
ggugcggcugcauggucag

SEQ ID NO: 258 - RNA, 19 nt, Artificial Sequence
  Description of Artificial Sequence:  siNA antisense region
ggggaagaaucucucucug

SEQ ID NO: 259 - RNA, 19 nt, Artificial Sequence
  Description of Artificial Sequence:  siNA antisense region
cagugacuagagccaauug

SEQ ID NO: 260 - RNA, 19 nt, Artificial Sequence
  Description of Artificial Sequence:  siNA antisense region
uaucauaaagugagaugcc

SEQ ID NO: 261 - RNA, 19 nt, Artificial Sequence
  Description of Artificial Sequence:  siNA antisense region
cuagguaguagccuucccu

SEQ ID NO: 262 - RNA, 19 nt, Artificial Sequence
  Description of Artificial Sequence:  siNA antisense region
ucacugacuuaaagugccc

SEQ ID NO: 263 - RNA, 19 nt, Artificial Sequence
  Description of Artificial Sequence:  siNA antisense region
agugcaaauaaggggcugu

SEQ ID NO: 264 - RNA, 19 nt, Artificial Sequence
  Description of Artificial Sequence:  siNA antisense region
guuauggucaaaaggugaa

SEQ ID NO: 265 - RNA, 19 nt, Artificial Sequence
  Description of Artificial Sequence:  siNA antisense region
uccugcucuggggaaacag

SEQ ID NO: 266 - RNA, 19 nt, Artificial Sequence
  Description of Artificial Sequence:  siNA antisense region
caagguauuuccacaagcu

SEQ ID NO: 267 - RNA, 19 nt, Artificial Sequence
  Description of Artificial Sequence:  siNA antisense region
gcaggcugcaacaucagcc

SEQ ID NO: 268 - RNA, 19 nt, Artificial Sequence
  Description of Artificial Sequence:  siNA antisense region
gagacggaagcacuugcug

SEQ ID NO: 269 - RNA, 19 nt, Artificial Sequence
  Description of Artificial Sequence:  siNA antisense region
ugcuccccaaggauuccgg

SEQ ID NO: 270 - RNA, 19 nt, Artificial Sequence
  Description of Artificial Sequence:  siNA antisense region
agaaaagacguggacaagu

SEQ ID NO: 271 - RNA, 19 nt, Artificial Sequence
  Description of Artificial Sequence:  siNA antisense region
agugacuaccaugauauga

SEQ ID NO: 272 - RNA, 19 nt, Artificial Sequence
  Description of Artificial Sequence:  siNA antisense region
acauaccuuauauauguua

SEQ ID NO: 273 - RNA, 19 nt, Artificial Sequence
  Description of Artificial Sequence:  siNA antisense region
aaaagcugggccaauagca

SEQ ID NO: 274 - RNA, 19 nt, Artificial Sequence
  Description of Artificial Sequence:  siNA antisense region
aaaaugacugcauuuucua

SEQ ID NO: 275 - RNA, 19 nt, Artificial Sequence
  Description of Artificial Sequence:  siNA antisense region
acuuccuuuuuauuuagaa

SEQ ID NO: 276 - RNA, 19 nt, Artificial Sequence
  Description of Artificial Sequence:  siNA antisense region
gacacugcugggugcagua

SEQ ID NO: 277 - RNA, 19 nt, Artificial Sequence
  Description of Artificial Sequence:  siNA antisense region
ccacaguaacuacagagug

SEQ ID NO: 278 - RNA, 19 nt, Artificial Sequence
  Description of Artificial Sequence:  siNA antisense region
ucuauaugguacaagugac

SEQ ID NO: 279 - RNA, 19 nt, Artificial Sequence
  Description of Artificial Sequence:  siNA antisense region
cuugacaaguguuacaccu

SEQ ID NO: 280 - RNA, 19 nt, Artificial Sequence
  Description of Artificial Sequence:  siNA antisense region
guacugcacauaacgcuuc

SEQ ID NO: 281 - RNA, 19 nt, Artificial Sequence
  Description of Artificial Sequence:  siNA antisense region
aagucuuacaaacauuaag

SEQ ID NO: 282 - RNA, 19 nt, Artificial Sequence
  Description of Artificial Sequence:  siNA antisense region
cuuuaaaucuuuuuuugua

SEQ ID NO: 283 - RNA, 19 nt, Artificial Sequence
  Description of Artificial Sequence:  siNA antisense region
ugucgagugaagcugccac

SEQ ID NO: 284 - RNA, 19 nt, Artificial Sequence
  Description of Artificial Sequence:  siNA antisense region
uguacuucucucaccaaau

SEQ ID NO: 285 - RNA, 19 nt, Artificial Sequence
  Description of Artificial Sequence:  siNA antisense region
gcucagcacugcaaccuuu

SEQ ID NO: 286 - RNA, 19 nt, Artificial Sequence
  Description of Artificial Sequence:  siNA antisense region
ccccagaaaccgcccacag

SEQ ID NO: 287 - RNA, 19 nt, Artificial Sequence
  Description of Artificial Sequence:  siNA antisense region
aguuccacccugggacauc

SEQ ID NO: 288 - RNA, 19 nt, Artificial Sequence
  Description of Artificial Sequence:  siNA antisense region
auaugcaccagcaugugga

SEQ ID NO: 289 - RNA, 19 nt, Artificial Sequence
  Description of Artificial Sequence:  siNA antisense region
gaaguagcucaagggcgua

SEQ ID NO: 290 - RNA, 19 nt, Artificial Sequence
  Description of Artificial Sequence:  siNA antisense region
gagguauaaaccacauuug

SEQ ID NO: 291 - RNA, 19 nt, Artificial Sequence
  Description of Artificial Sequence:  siNA antisense region
aaagauucuuguaucugcg

SEQ ID NO: 292 - RNA, 19 nt, Artificial Sequence
  Description of Artificial Sequence:  siNA antisense region
aaagaauuguauauucaua

SEQ ID NO: 293 - RNA, 19 nt, Artificial Sequence
  Description of Artificial Sequence:  siNA antisense region
gcuaagcuguagaaggaaa

SEQ ID NO: 294 - RNA, 19 nt, Artificial Sequence
  Description of Artificial Sequence:  siNA antisense region
cgugguugaaaagacggag

SEQ ID NO: 295 - RNA, 19 nt, Artificial Sequence
  Description of Artificial Sequence:  siNA antisense region
ggucggguuuuaaauguuc

SEQ ID NO: 296 - RNA, 19 nt, Artificial Sequence
  Description of Artificial Sequence:  siNA antisense region
gacagaacagugcuaguag

SEQ ID NO: 297 - RNA, 19 nt, Artificial Sequence
  Description of Artificial Sequence:  siNA antisense region
aauauuugaguacuugagg

SEQ ID NO: 298 - RNA, 19 nt, Artificial Sequence
  Description of Artificial Sequence:  siNA antisense region
ugacucagcaguaucagaa

SEQ ID NO: 299 - RNA, 19 nt, Artificial Sequence
  Description of Artificial Sequence:  siNA antisense region
uagcuuuuucugacagucu

SEQ ID NO: 300 - RNA, 19 nt, Artificial Sequence
  Description of Artificial Sequence:  siNA antisense region
ccaaacacgaguuagugcu

SEQ ID NO: 301 - RNA, 19 nt, Artificial Sequence
  Description of Artificial Sequence:  siNA antisense region
uaaaauauggauagagcuc

SEQ ID NO: 302 - RNA, 19 nt, Artificial Sequence
  Description of Artificial Sequence:  siNA antisense region
aauacuuaaagagaucagu

SEQ ID NO: 303 - RNA, 19 nt, Artificial Sequence
  Description of Artificial Sequence:  siNA antisense region
uacacaguggcaggaacaa

SEQ ID NO: 304 - RNA, 19 nt, Artificial Sequence
  Description of Artificial Sequence:  siNA antisense region
accgagucaacuccacagu

SEQ ID NO: 305 - RNA, 19 nt, Artificial Sequence
  Description of Artificial Sequence:  siNA antisense region
accgcacugggacagaaca

SEQ ID NO: 306 - RNA, 19 nt, Artificial Sequence
  Description of Artificial Sequence:  siNA antisense region
gggaagucaagaggaggca

SEQ ID NO: 307 - RNA, 19 nt, Artificial Sequence
  Description of Artificial Sequence:  siNA antisense region
ucaccacagagagcagugg

SEQ ID NO: 308 - RNA, 19 nt, Artificial Sequence
  Description of Artificial Sequence:  siNA antisense region
uugaacaaggcaaauuucu

SEQ ID NO: 309 - RNA, 19 nt, Artificial Sequence
  Description of Artificial Sequence:  siNA antisense region
gcgaggguacaguaauuau

SEQ ID NO: 310 - RNA, 19 nt, Artificial Sequence
  Description of Artificial Sequence:  siNA antisense region
gaaagcuguaacagucaug

SEQ ID NO: 311 - RNA, 19 nt, Artificial Sequence
  Description of Artificial Sequence:  siNA antisense region
gacagucaucucugcacag

SEQ ID NO: 312 - RNA, 19 nt, Artificial Sequence
  Description of Artificial Sequence:  siNA antisense region
guaggcauguggcacuugg

SEQ ID NO: 313 - RNA, 19 nt, Artificial Sequence
  Description of Artificial Sequence:  siNA antisense region
agaguuuucauuucaaucg

SEQ ID NO: 314 - RNA, 19 nt, Artificial Sequence
  Description of Artificial Sequence:  siNA antisense region
caacucagagguaacaaua

SEQ ID NO: 315 - RNA, 19 nt, Artificial Sequence
  Description of Artificial Sequence:  siNA antisense region
agcauuuuccguggaacac

SEQ ID NO: 316 - RNA, 19 nt, Artificial Sequence
  Description of Artificial Sequence:  siNA antisense region
cuaaaugaucugcuggaua

SEQ ID NO: 317 - RNA, 19 nt, Artificial Sequence
  Description of Artificial Sequence:  siNA antisense region
aaaauagaauuauuuuucc

SEQ ID NO: 318 - RNA, 19 nt, Artificial Sequence
  Description of Artificial Sequence:  siNA antisense region
cugagaaaugaaaagcuaa

SEQ ID NO: 319 - RNA, 19 nt, Artificial Sequence
  Description of Artificial Sequence:  siNA antisense region
aacaagaaaaaaggacagc

SEQ ID NO: 320 - RNA, 19 nt, Artificial Sequence
  Description of Artificial Sequence:  siNA antisense region
cauugcugucaaaaaucaa

SEQ ID NO: 321 - RNA, 19 nt, Artificial Sequence
  Description of Artificial Sequence:  siNA antisense region
uuuauauaacccauucucc

SEQ ID NO: 322 - RNA, 19 nt, Artificial Sequence
  Description of Artificial Sequence:  siNA antisense region
ucauauuagcaggcagucu

SEQ ID NO: 323 - RNA, 19 nt, Artificial Sequence
  Description of Artificial Sequence:  siNA antisense region
uuacaaaugcauuucuguu

SEQ ID NO: 324 - RNA, 19 nt, Artificial Sequence
  Description of Artificial Sequence:  siNA antisense region
uacauuuauuuucaugaau

SEQ ID NO: 325 - RNA, 19 nt, Artificial Sequence
  Description of Artificial Sequence:  siNA antisense region
uuuugaagauagaagaugu

SEQ ID NO: 326 - RNA, 19 nt, Artificial Sequence
  Description of Artificial Sequence:  siNA antisense region
uuuuuuuuuuuuuuuugaa

SEQ ID NO: 327 - RNA, 19 nt, Artificial Sequence
  Description of Artificial Sequence:  Target sequence/siNA sense region
cggggccucgggcggggcc

SEQ ID NO: 328 - RNA, 19 nt, Artificial Sequence
  Description of Artificial Sequence:  Target sequence/siNA sense region
cgccguggggaggagggcg

SEQ ID NO: 329 - RNA, 19 nt, Artificial Sequence
  Description of Artificial Sequence:  Target sequence/siNA sense region
ggugggaggggaggagugg

SEQ ID NO: 330 - RNA, 19 nt, Artificial Sequence
  Description of Artificial Sequence:  Target sequence/siNA sense region
gagauggcggcggcggcgg

SEQ ID NO: 331 - RNA, 19 nt, Artificial Sequence
  Description of Artificial Sequence:  Target sequence/siNA sense region
gcucaggggggcgggggcg

SEQ ID NO: 332 - RNA, 19 nt, Artificial Sequence
  Description of Artificial Sequence:  Target sequence/siNA sense region
ggggagccccguagaaccg

SEQ ID NO: 333 - RNA, 19 nt, Artificial Sequence
  Description of Artificial Sequence:  Target sequence/siNA sense region
gagggggucggcccggggg

SEQ ID NO: 334 - RNA, 19 nt, Artificial Sequence
  Description of Artificial Sequence:  Target sequence/siNA sense region
gucccgggggagguggaga

SEQ ID NO: 335 - RNA, 19 nt, Artificial Sequence
  Description of Artificial Sequence:  Target sequence/siNA sense region
auggugaaggggcagccgu

SEQ ID NO: 336 - RNA, 19 nt, Artificial Sequence
  Description of Artificial Sequence:  Target sequence/siNA sense region
uucgacgugggcccgcgcu

SEQ ID NO: 337 - RNA, 19 nt, Artificial Sequence
  Description of Artificial Sequence:  Target sequence/siNA sense region
uacacgcaguugcaguaca

SEQ ID NO: 338 - RNA, 19 nt, Artificial Sequence
  Description of Artificial Sequence:  Target sequence/siNA sense region
aucggcgagggcgcguacg

SEQ ID NO: 339 - RNA, 19 nt, Artificial Sequence
  Description of Artificial Sequence:  Target sequence/siNA sense region
ggcauggucagcucggccu

SEQ ID NO: 340 - RNA, 19 nt, Artificial Sequence
  Description of Artificial Sequence:  Target sequence/siNA sense region
uaugaccacgugcgcaaga

SEQ ID NO: 341 - RNA, 19 nt, Artificial Sequence
  Description of Artificial Sequence:  Target sequence/siNA sense region
acucgcguggccaucaaga

SEQ ID NO: 342 - RNA, 19 nt, Artificial Sequence
  Description of Artificial Sequence:  Target sequence/siNA sense region
aagaucagccccuucgaac

SEQ ID NO: 343 - RNA, 19 nt, Artificial Sequence
  Description of Artificial Sequence:  Target sequence/siNA sense region
caucagaccuacugccagc

SEQ ID NO: 344 - RNA, 19 nt, Artificial Sequence
  Description of Artificial Sequence:  Target sequence/siNA sense region
cgcacgcuccgggagaucc

SEQ ID NO: 345 - RNA, 19 nt, Artificial Sequence
  Description of Artificial Sequence:  Target sequence/siNA sense region
cagauccugcugcgcuucc

SEQ ID NO: 346 - RNA, 19 nt, Artificial Sequence
  Description of Artificial Sequence:  Target sequence/siNA sense region
cgccaugagaaugucaucg

SEQ ID NO: 347 - RNA, 19 nt, Artificial Sequence
  Description of Artificial Sequence:  Target sequence/siNA sense region
ggcauccgagacauucugc

SEQ ID NO: 348 - RNA, 19 nt, Artificial Sequence
  Description of Artificial Sequence:  Target sequence/siNA sense region
cgggcguccacccuggaag

SEQ ID NO: 349 - RNA, 19 nt, Artificial Sequence
  Description of Artificial Sequence:  Target sequence/siNA sense region
gccaugagagaugucuaca

SEQ ID NO: 350 - RNA, 19 nt, Artificial Sequence
  Description of Artificial Sequence:  Target sequence/siNA sense region
auugugcaggaccugaugg

SEQ ID NO: 351 - RNA, 19 nt, Artificial Sequence
  Description of Artificial Sequence:  Target sequence/siNA sense region
gagacugaccuguacaagu

SEQ ID NO: 352 - RNA, 19 nt, Artificial Sequence
  Description of Artificial Sequence:  Target sequence/siNA sense region
uugcugaaaagccagcagc

SEQ ID NO: 353 - RNA, 19 nt, Artificial Sequence
  Description of Artificial Sequence:  Target sequence/siNA sense region
cugagcaaugaccauaucu

SEQ ID NO: 354 - RNA, 19 nt, Artificial Sequence
  Description of Artificial Sequence:  Target sequence/siNA sense region
ugcuacuuccucuaccaga

SEQ ID NO: 355 - RNA, 19 nt, Artificial Sequence
  Description of Artificial Sequence:  Target sequence/siNA sense region
auccugcggggccucaagu

SEQ ID NO: 356 - RNA, 19 nt, Artificial Sequence
  Description of Artificial Sequence:  Target sequence/siNA sense region
uacauccacuccgccaacg

SEQ ID NO: 357 - RNA, 19 nt, Artificial Sequence
  Description of Artificial Sequence:  Target sequence/siNA sense region
gugcuccaccgagaucuaa

SEQ ID NO: 358 - RNA, 19 nt, Artificial Sequence
  Description of Artificial Sequence:  Target sequence/siNA sense region
aagcccuccaaccugcuca

SEQ ID NO: 359 - RNA, 19 nt, Artificial Sequence
  Description of Artificial Sequence:  Target sequence/siNA sense region
aucaacaccaccugcgacc

SEQ ID NO: 360 - RNA, 19 nt, Artificial Sequence
  Description of Artificial Sequence:  Target sequence/siNA sense region
cuuaagauuugugauuucg

SEQ ID NO: 361 - RNA, 19 nt, Artificial Sequence
  Description of Artificial Sequence:  Target sequence/siNA sense region
ggccuggcccggauugccg

SEQ ID NO: 362 - RNA, 19 nt, Artificial Sequence
  Description of Artificial Sequence:  Target sequence/siNA sense region
gauccugagcaugaccaca

SEQ ID NO: 363 - RNA, 19 nt, Artificial Sequence
  Description of Artificial Sequence:  Target sequence/siNA sense region
accggcuuccugacggagu

SEQ ID NO: 364 - RNA, 19 nt, Artificial Sequence
  Description of Artificial Sequence:  Target sequence/siNA sense region
uauguggcuacgcgcuggu

SEQ ID NO: 365 - RNA, 19 nt, Artificial Sequence
  Description of Artificial Sequence:  Target sequence/siNA sense region
uaccgggccccagagauca

SEQ ID NO: 366 - RNA, 19 nt, Artificial Sequence
  Description of Artificial Sequence:  Target sequence/siNA sense region
augcugaacuccaagggcu

SEQ ID NO: 367 - RNA, 19 nt, Artificial Sequence
  Description of Artificial Sequence:  Target sequence/siNA sense region
uauaccaaguccaucgaca

SEQ ID NO: 368 - RNA, 19 nt, Artificial Sequence
  Description of Artificial Sequence:  Target sequence/siNA sense region
aucuggucugugggcugca

SEQ ID NO: 369 - RNA, 19 nt, Artificial Sequence
  Description of Artificial Sequence:  Target sequence/siNA sense region
auucuggcugagaugcucu

SEQ ID NO: 370 - RNA, 19 nt, Artificial Sequence
  Description of Artificial Sequence:  Target sequence/siNA sense region
ucuaaccggcccaucuucc

SEQ ID NO: 371 - RNA, 19 nt, Artificial Sequence
  Description of Artificial Sequence:  Target sequence/siNA sense region
ccuggcaagcacuaccugg

SEQ ID NO: 372 - RNA, 19 nt, Artificial Sequence
  Description of Artificial Sequence:  Target sequence/siNA sense region
gaucagcucaaccacauuc

SEQ ID NO: 373 - RNA, 19 nt, Artificial Sequence
  Description of Artificial Sequence:  Target sequence/siNA sense region
cugggcauccugggcuccc

SEQ ID NO: 374 - RNA, 19 nt, Artificial Sequence
  Description of Artificial Sequence:  Target sequence/siNA sense region
ccaucccaggaggaccuga

SEQ ID NO: 375 - RNA, 19 nt, Artificial Sequence
  Description of Artificial Sequence:  Target sequence/siNA sense region
aauuguaucaucaacauga

SEQ ID NO: 376 - RNA, 19 nt, Artificial Sequence
  Description of Artificial Sequence:  Target sequence/siNA sense region
aaggcccgaaacuaccuac

SEQ ID NO: 377 - RNA, 19 nt, Artificial Sequence
  Description of Artificial Sequence:  Target sequence/siNA sense region
cagucucugcccuccaaga

SEQ ID NO: 378 - RNA, 19 nt, Artificial Sequence
  Description of Artificial Sequence:  Target sequence/siNA sense region
accaagguggcuugggcca

SEQ ID NO: 379 - RNA, 19 nt, Artificial Sequence
  Description of Artificial Sequence:  Target sequence/siNA sense region
aagcuuuuccccaagucag

SEQ ID NO: 380 - RNA, 19 nt, Artificial Sequence
  Description of Artificial Sequence:  Target sequence/siNA sense region
gacuccaaagcccuugacc

SEQ ID NO: 381 - RNA, 19 nt, Artificial Sequence
  Description of Artificial Sequence:  Target sequence/siNA sense region
cugcuggaccggauguuaa

SEQ ID NO: 382 - RNA, 19 nt, Artificial Sequence
  Description of Artificial Sequence:  Target sequence/siNA sense region
accuuuaaccccaauaaac

SEQ ID NO: 383 - RNA, 19 nt, Artificial Sequence
  Description of Artificial Sequence:  Target sequence/siNA sense region
cggaucacaguggaggaag

SEQ ID NO: 384 - RNA, 19 nt, Artificial Sequence
  Description of Artificial Sequence:  Target sequence/siNA sense region
gcgcuggcucaccccuacc

SEQ ID NO: 385 - RNA, 19 nt, Artificial Sequence
  Description of Artificial Sequence:  Target sequence/siNA sense region
cuggagcaguacuaugacc

SEQ ID NO: 386 - RNA, 19 nt, Artificial Sequence
  Description of Artificial Sequence:  Target sequence/siNA sense region
ccgacggaugagccagugg

SEQ ID NO: 387 - RNA, 19 nt, Artificial Sequence
  Description of Artificial Sequence:  Target sequence/siNA sense region
gccgaggagcccuucaccu

SEQ ID NO: 388 - RNA, 19 nt, Artificial Sequence
  Description of Artificial Sequence:  Target sequence/siNA sense region
uucgccauggagcuggaug

SEQ ID NO: 389 - RNA, 19 nt, Artificial Sequence
  Description of Artificial Sequence:  Target sequence/siNA sense region
gaccuaccuaaggagcggc

SEQ ID NO: 390 - RNA, 19 nt, Artificial Sequence
  Description of Artificial Sequence:  Target sequence/siNA sense region
cugaaggagcucaucuucc

SEQ ID NO: 391 - RNA, 19 nt, Artificial Sequence
  Description of Artificial Sequence:  Target sequence/siNA sense region
caggagacagcacgcuucc

SEQ ID NO: 392 - RNA, 19 nt, Artificial Sequence
  Description of Artificial Sequence:  Target sequence/siNA sense region
cagcccggagugcuggagg

SEQ ID NO: 393 - RNA, 19 nt, Artificial Sequence
  Description of Artificial Sequence:  Target sequence/siNA sense region
gcccccuagcccagacaga

SEQ ID NO: 394 - RNA, 19 nt, Artificial Sequence
  Description of Artificial Sequence:  Target sequence/siNA sense region
acaucucugcacccugggg

SEQ ID NO: 395 - RNA, 19 nt, Artificial Sequence
  Description of Artificial Sequence:  Target sequence/siNA sense region
gccuggaacagaacuggca

SEQ ID NO: 396 - RNA, 19 nt, Artificial Sequence
  Description of Artificial Sequence:  Target sequence/siNA sense region
aaagaggcaagaggucacu

SEQ ID NO: 397 - RNA, 19 nt, Artificial Sequence
  Description of Artificial Sequence:  Target sequence/siNA sense region
ugagggccucugucaccca

SEQ ID NO: 398 - RNA, 19 nt, Artificial Sequence
  Description of Artificial Sequence:  Target sequence/siNA sense region
aggaccugccuccugccug

SEQ ID NO: 399 - RNA, 19 nt, Artificial Sequence
  Description of Artificial Sequence:  Target sequence/siNA sense region
gccccucucccgccagacu

SEQ ID NO: 400 - RNA, 19 nt, Artificial Sequence
  Description of Artificial Sequence:  Target sequence/siNA sense region
uguuagaaaauggacacug

SEQ ID NO: 401 - RNA, 19 nt, Artificial Sequence
  Description of Artificial Sequence:  Target sequence/siNA sense region
gugcccagcccggaccuug

SEQ ID NO: 402 - RNA, 19 nt, Artificial Sequence
  Description of Artificial Sequence:  Target sequence/siNA sense region
ggcagcccaggccggggug

SEQ ID NO: 403 - RNA, 19 nt, Artificial Sequence
  Description of Artificial Sequence:  Target sequence/siNA sense region
ggagcaugggccuggccac

SEQ ID NO: 404 - RNA, 19 nt, Artificial Sequence
  Description of Artificial Sequence:  Target sequence/siNA sense region
ccucucuccuuugcugagg

SEQ ID NO: 405 - RNA, 19 nt, Artificial Sequence
  Description of Artificial Sequence:  Target sequence/siNA sense region
gccuccagcuucaggcagg

SEQ ID NO: 406 - RNA, 19 nt, Artificial Sequence
  Description of Artificial Sequence:  Target sequence/siNA sense region
gccaaggccuucuccuccc

SEQ ID NO: 407 - RNA, 19 nt, Artificial Sequence
  Description of Artificial Sequence:  Target sequence/siNA sense region
ccacccgcccuccccacgg

SEQ ID NO: 408 - RNA, 19 nt, Artificial Sequence
  Description of Artificial Sequence:  Target sequence/siNA sense region
gggccucgggaccucaggu

SEQ ID NO: 409 - RNA, 19 nt, Artificial Sequence
  Description of Artificial Sequence:  Target sequence/siNA sense region
uggccccaguucaaucucc

SEQ ID NO: 410 - RNA, 19 nt, Artificial Sequence
  Description of Artificial Sequence:  Target sequence/siNA sense region
ccgcugcugcugcugcgcc

SEQ ID NO: 411 - RNA, 19 nt, Artificial Sequence
  Description of Artificial Sequence:  Target sequence/siNA sense region
ccuuaccuuccccagcguc

SEQ ID NO: 412 - RNA, 19 nt, Artificial Sequence
  Description of Artificial Sequence:  Target sequence/siNA sense region
cccagucucuggcaguucu

SEQ ID NO: 413 - RNA, 19 nt, Artificial Sequence
  Description of Artificial Sequence:  Target sequence/siNA sense region
uggaauggaaggguucugg

SEQ ID NO: 414 - RNA, 19 nt, Artificial Sequence
  Description of Artificial Sequence:  Target sequence/siNA sense region
gcugccccaaccugcugaa

SEQ ID NO: 415 - RNA, 19 nt, Artificial Sequence
  Description of Artificial Sequence:  Target sequence/siNA sense region
agggcagagguggagggug

SEQ ID NO: 416 - RNA, 19 nt, Artificial Sequence
  Description of Artificial Sequence:  Target sequence/siNA sense region
ggggggcgcugaguaggga

SEQ ID NO: 417 - RNA, 19 nt, Artificial Sequence
  Description of Artificial Sequence:  Target sequence/siNA sense region
acucagggccaugccugcc

SEQ ID NO: 418 - RNA, 19 nt, Artificial Sequence
  Description of Artificial Sequence:  Target sequence/siNA sense region
cccccucaucucauucaaa

SEQ ID NO: 419 - RNA, 19 nt, Artificial Sequence
  Description of Artificial Sequence:  Target sequence/siNA sense region
accccacccuaguuucccu

SEQ ID NO: 420 - RNA, 19 nt, Artificial Sequence
  Description of Artificial Sequence:  Target sequence/siNA sense region
ugaaggaacauuccuuagu

SEQ ID NO: 421 - RNA, 19 nt, Artificial Sequence
  Description of Artificial Sequence:  Target sequence/siNA sense region
ucucaagggcuagcauccc

SEQ ID NO: 422 - RNA, 19 nt, Artificial Sequence
  Description of Artificial Sequence:  Target sequence/siNA sense region
cugaggagccaggccgggc

SEQ ID NO: 423 - RNA, 19 nt, Artificial Sequence
  Description of Artificial Sequence:  Target sequence/siNA sense region
ccgaauccccucccuguca

SEQ ID NO: 424 - RNA, 19 nt, Artificial Sequence
  Description of Artificial Sequence:  Target sequence/siNA sense region
aaagcugucacuucgcgug

SEQ ID NO: 425 - RNA, 19 nt, Artificial Sequence
  Description of Artificial Sequence:  Target sequence/siNA sense region
gcccucgcugcuucugugu

SEQ ID NO: 426 - RNA, 19 nt, Artificial Sequence
  Description of Artificial Sequence:  Target sequence/siNA sense region
uguggugagcagaagugga

SEQ ID NO: 427 - RNA, 19 nt, Artificial Sequence
  Description of Artificial Sequence:  Target sequence/siNA sense region
agcuggggggcguggagag

SEQ ID NO: 428 - RNA, 19 nt, Artificial Sequence
  Description of Artificial Sequence:  Target sequence/siNA sense region
gcccggcgccccugccacc

SEQ ID NO: 429 - RNA, 19 nt, Artificial Sequence
  Description of Artificial Sequence:  Target sequence/siNA sense region
cucccugacccgucuaaua

SEQ ID NO: 430 - RNA, 19 nt, Artificial Sequence
  Description of Artificial Sequence:  Target sequence/siNA sense region
auauaaauauagagaugug

SEQ ID NO: 431 - RNA, 19 nt, Artificial Sequence
  Description of Artificial Sequence:  Target sequence/siNA sense region
auagagaugugucuauggc

SEQ ID NO: 432 - RNA, 19 nt, Artificial Sequence
  Description of Artificial Sequence:  siNA antisense region
ggccccgcccgaggccccg

SEQ ID NO: 433 - RNA, 19 nt, Artificial Sequence
  Description of Artificial Sequence:  siNA antisense region
cgcccuccuccccacggcg

SEQ ID NO: 434 - RNA, 19 nt, Artificial Sequence
  Description of Artificial Sequence:  siNA antisense region
ccacuccuccccucccacc

SEQ ID NO: 435 - RNA, 19 nt, Artificial Sequence
  Description of Artificial Sequence:  siNA antisense region
ccgccgccgccgccaucuc

SEQ ID NO: 436 - RNA, 19 nt, Artificial Sequence
  Description of Artificial Sequence:  siNA antisense region
cgcccccgccccccugagc

SEQ ID NO: 437 - RNA, 19 nt, Artificial Sequence
  Description of Artificial Sequence:  siNA antisense region
cgguucuacggggcucccc

SEQ ID NO: 438 - RNA, 19 nt, Artificial Sequence
  Description of Artificial Sequence:  siNA antisense region
cccccgggccgacccccuc

SEQ ID NO: 439 - RNA, 19 nt, Artificial Sequence
  Description of Artificial Sequence:  siNA antisense region
ucuccaccucccccgggac

SEQ ID NO: 440 - RNA, 19 nt, Artificial Sequence
  Description of Artificial Sequence:  siNA antisense region
acggcugccccuucaccau

SEQ ID NO: 441 - RNA, 19 nt, Artificial Sequence
  Description of Artificial Sequence:  siNA antisense region
agcgcgggcccacgucgaa

SEQ ID NO: 442 - RNA, 19 nt, Artificial Sequence
  Description of Artificial Sequence:  siNA antisense region
uguacugcaacugcgugua

SEQ ID NO: 443 - RNA, 19 nt, Artificial Sequence
  Description of Artificial Sequence:  siNA antisense region
cguacgcgcccucgccgau

SEQ ID NO: 444 - RNA, 19 nt, Artificial Sequence
  Description of Artificial Sequence:  siNA antisense region
aggccgagcugaccaugcc

SEQ ID NO: 445 - RNA, 19 nt, Artificial Sequence
  Description of Artificial Sequence:  siNA antisense region
ucuugcgcacguggucaua

SEQ ID NO: 446 - RNA, 19 nt, Artificial Sequence
  Description of Artificial Sequence:  siNA antisense region
ucuugauggccacgcgagu

SEQ ID NO: 447 - RNA, 19 nt, Artificial Sequence
  Description of Artificial Sequence:  siNA antisense region
guucgaaggggcugaucuu

SEQ ID NO: 448 - RNA, 19 nt, Artificial Sequence
  Description of Artificial Sequence:  siNA antisense region
gcuggcaguaggucugaug

SEQ ID NO: 449 - RNA, 19 nt, Artificial Sequence
  Description of Artificial Sequence:  siNA antisense region
ggaucucccggagcgugcg

SEQ ID NO: 450 - RNA, 19 nt, Artificial Sequence
  Description of Artificial Sequence:  siNA antisense region
ggaagcgcagcaggaucug

SEQ ID NO: 451 - RNA, 19 nt, Artificial Sequence
  Description of Artificial Sequence:  siNA antisense region
cgaugacauucucauggcg

SEQ ID NO: 452 - RNA, 19 nt, Artificial Sequence
  Description of Artificial Sequence:  siNA antisense region
gcagaaugucucggaugcc

SEQ ID NO: 453 - RNA, 19 nt, Artificial Sequence
  Description of Artificial Sequence:  siNA antisense region
cuuccaggguggacgcccg

SEQ ID NO: 454 - RNA, 19 nt, Artificial Sequence
  Description of Artificial Sequence:  siNA antisense region
uguagacaucucucauggc

SEQ ID NO: 455 - RNA, 19 nt, Artificial Sequence
  Description of Artificial Sequence:  siNA antisense region
ccaucagguccugcacaau

SEQ ID NO: 456 - RNA, 19 nt, Artificial Sequence
  Description of Artificial Sequence:  siNA antisense region
acuuguacaggucagucuc

SEQ ID NO: 457 - RNA, 19 nt, Artificial Sequence
  Description of Artificial Sequence:  siNA antisense region
gcugcuggcuuuucagcaa

SEQ ID NO: 458 - RNA, 19 nt, Artificial Sequence
  Description of Artificial Sequence:  siNA antisense region
agauauggucauugcucag

SEQ ID NO: 459 - RNA, 19 nt, Artificial Sequence
  Description of Artificial Sequence:  siNA antisense region
ucugguagaggaaguagca

SEQ ID NO: 460 - RNA, 19 nt, Artificial Sequence
  Description of Artificial Sequence:  siNA antisense region
acuugaggccccgcaggau

SEQ ID NO: 461 - RNA, 19 nt, Artificial Sequence
  Description of Artificial Sequence:  siNA antisense region
cguuggcggaguggaugua

SEQ ID NO: 462 - RNA, 19 nt, Artificial Sequence
  Description of Artificial Sequence:  siNA antisense region
uuagaucucgguggagcac

SEQ ID NO: 463 - RNA, 19 nt, Artificial Sequence
  Description of Artificial Sequence:  siNA antisense region
ugagcagguuggagggcuu

SEQ ID NO: 464 - RNA, 19 nt, Artificial Sequence
  Description of Artificial Sequence:  siNA antisense region
ggucgcaggugguguugau

SEQ ID NO: 465 - RNA, 19 nt, Artificial Sequence
  Description of Artificial Sequence:  siNA antisense region
cgaaaucacaaaucuuaag

SEQ ID NO: 466 - RNA, 19 nt, Artificial Sequence
  Description of Artificial Sequence:  siNA antisense region
cggcaauccgggccaggcc

SEQ ID NO: 467 - RNA, 19 nt, Artificial Sequence
  Description of Artificial Sequence:  siNA antisense region
uguggucaugcucaggauc

SEQ ID NO: 468 - RNA, 19 nt, Artificial Sequence
  Description of Artificial Sequence:  siNA antisense region
acuccgucaggaagccggu

SEQ ID NO: 469 - RNA, 19 nt, Artificial Sequence
  Description of Artificial Sequence:  siNA antisense region
accagcgcguagccacaua

SEQ ID NO: 470 - RNA, 19 nt, Artificial Sequence
  Description of Artificial Sequence:  siNA antisense region
ugaucucuggggcccggua

SEQ ID NO: 471 - RNA, 19 nt, Artificial Sequence
  Description of Artificial Sequence:  siNA antisense region
agcccuuggaguucagcau

SEQ ID NO: 472 - RNA, 19 nt, Artificial Sequence
  Description of Artificial Sequence:  siNA antisense region
ugucgauggacuugguaua

SEQ ID NO: 473 - RNA, 19 nt, Artificial Sequence
  Description of Artificial Sequence:  siNA antisense region
ugcagcccacagaccagau

SEQ ID NO: 474 - RNA, 19 nt, Artificial Sequence
  Description of Artificial Sequence:  siNA antisense region
agagcaucucagccagaau

SEQ ID NO: 475 - RNA, 19 nt, Artificial Sequence
  Description of Artificial Sequence:  siNA antisense region
ggaagaugggccgguuaga

SEQ ID NO: 476 - RNA, 19 nt, Artificial Sequence
  Description of Artificial Sequence:  siNA antisense region
ccagguagugcuugccagg

SEQ ID NO: 477 - RNA, 19 nt, Artificial Sequence
  Description of Artificial Sequence:  siNA antisense region
gaaugugguugagcugauc

SEQ ID NO: 478 - RNA, 19 nt, Artificial Sequence
  Description of Artificial Sequence:  siNA antisense region
gggagcccaggaugcccag

SEQ ID NO: 479 - RNA, 19 nt, Artificial Sequence
  Description of Artificial Sequence:  siNA antisense region
ucagguccuccugggaugg

SEQ ID NO: 480 - RNA, 19 nt, Artificial Sequence
  Description of Artificial Sequence:  siNA antisense region
ucauguugaugauacaauu

SEQ ID NO: 481 - RNA, 19 nt, Artificial Sequence
  Description of Artificial Sequence:  siNA antisense region
guagguaguuucgggccuu

SEQ ID NO: 482 - RNA, 19 nt, Artificial Sequence
  Description of Artificial Sequence:  siNA antisense region
ucuuggagggcagagacug

SEQ ID NO: 483 - RNA, 19 nt, Artificial Sequence
  Description of Artificial Sequence:  siNA antisense region
uggcccaagccaccuuggu

SEQ ID NO: 484 - RNA, 19 nt, Artificial Sequence
  Description of Artificial Sequence:  siNA antisense region
cugacuuggggaaaagcuu

SEQ ID NO: 485 - RNA, 19 nt, Artificial Sequence
  Description of Artificial Sequence:  siNA antisense region
ggucaagggcuuuggaguc

SEQ ID NO: 486 - RNA, 19 nt, Artificial Sequence
  Description of Artificial Sequence:  siNA antisense region
uuaacauccgguccagcag

SEQ ID NO: 487 - RNA, 19 nt, Artificial Sequence
  Description of Artificial Sequence:  siNA antisense region
guuuauugggguuaaaggu

SEQ ID NO: 488 - RNA, 19 nt, Artificial Sequence
  Description of Artificial Sequence:  siNA antisense region
cuuccuccacugugauccg

SEQ ID NO: 489 - RNA, 19 nt, Artificial Sequence
  Description of Artificial Sequence:  siNA antisense region
gguaggggugagccagcgc

SEQ ID NO: 490 - RNA, 19 nt, Artificial Sequence
  Description of Artificial Sequence:  siNA antisense region
ggucauaguacugcuccag

SEQ ID NO: 491 - RNA, 19 nt, Artificial Sequence
  Description of Artificial Sequence:  siNA antisense region
ccacuggcucauccgucgg

SEQ ID NO: 492 - RNA, 19 nt, Artificial Sequence
  Description of Artificial Sequence:  siNA antisense region
aggugaagggcuccucggc

SEQ ID NO: 493 - RNA, 19 nt, Artificial Sequence
  Description of Artificial Sequence:  siNA antisense region
cauccagcuccauggcgaa

SEQ ID NO: 494 - RNA, 19 nt, Artificial Sequence
  Description of Artificial Sequence:  siNA antisense region
gccgcuccuuagguagguc

SEQ ID NO: 495 - RNA, 19 nt, Artificial Sequence
  Description of Artificial Sequence:  siNA antisense region
ggaagaugagcuccuucag

SEQ ID NO: 496 - RNA, 19 nt, Artificial Sequence
  Description of Artificial Sequence:  siNA antisense region
ggaagcgugcugucuccug

SEQ ID NO: 497 - RNA, 19 nt, Artificial Sequence
  Description of Artificial Sequence:  siNA antisense region
ccuccagcacuccgggcug

SEQ ID NO: 498 - RNA, 19 nt, Artificial Sequence
  Description of Artificial Sequence:  siNA antisense region
ucugucugggcuagggggc

SEQ ID NO: 499 - RNA, 19 nt, Artificial Sequence
  Description of Artificial Sequence:  siNA antisense region
ccccagggugcagagaugu

SEQ ID NO: 500 - RNA, 19 nt, Artificial Sequence
  Description of Artificial Sequence:  siNA antisense region
ugccaguucuguuccaggc

SEQ ID NO: 501 - RNA, 19 nt, Artificial Sequence
  Description of Artificial Sequence:  siNA antisense region
agugaccucuugccucuuu

SEQ ID NO: 502 - RNA, 19 nt, Artificial Sequence
  Description of Artificial Sequence:  siNA antisense region
ugggugacagaggcccuca

SEQ ID NO: 503 - RNA, 19 nt, Artificial Sequence
  Description of Artificial Sequence:  siNA antisense region
caggcaggaggcagguccu

SEQ ID NO: 504 - RNA, 19 nt, Artificial Sequence
  Description of Artificial Sequence:  siNA antisense region
agucuggcgggagaggggc

SEQ ID NO: 505 - RNA, 19 nt, Artificial Sequence
  Description of Artificial Sequence:  siNA antisense region
caguguccauuuucuaaca

SEQ ID NO: 506 - RNA, 19 nt, Artificial Sequence
  Description of Artificial Sequence:  siNA antisense region
caagguccgggcugggcac

SEQ ID NO: 507 - RNA, 19 nt, Artificial Sequence
  Description of Artificial Sequence:  siNA antisense region
caccccggccugggcugcc

SEQ ID NO: 508 - RNA, 19 nt, Artificial Sequence
  Description of Artificial Sequence:  siNA antisense region
guggccaggcccaugcucc

SEQ ID NO: 509 - RNA, 19 nt, Artificial Sequence
  Description of Artificial Sequence:  siNA antisense region
ccucagcaaaggagagagg

SEQ ID NO: 510 - RNA, 19 nt, Artificial Sequence
  Description of Artificial Sequence:  siNA antisense region
ccugccugaagcuggaggc

SEQ ID NO: 511 - RNA, 19 nt, Artificial Sequence
  Description of Artificial Sequence:  siNA antisense region
gggaggagaaggccuuggc

SEQ ID NO: 512 - RNA, 19 nt, Artificial Sequence
  Description of Artificial Sequence:  siNA antisense region
ccguggggagggcgggugg

SEQ ID NO: 513 - RNA, 19 nt, Artificial Sequence
  Description of Artificial Sequence:  siNA antisense region
accugaggucccgaggccc

SEQ ID NO: 514 - RNA, 19 nt, Artificial Sequence
  Description of Artificial Sequence:  siNA antisense region
ggagauugaacuggggcca

SEQ ID NO: 515 - RNA, 19 nt, Artificial Sequence
  Description of Artificial Sequence:  siNA antisense region
ggcgcagcagcagcagcgg

SEQ ID NO: 516 - RNA, 19 nt, Artificial Sequence
  Description of Artificial Sequence:  siNA antisense region
gacgcuggggaagguaagg

SEQ ID NO: 517 - RNA, 19 nt, Artificial Sequence
  Description of Artificial Sequence:  siNA antisense region
agaacugccagagacuggg

SEQ ID NO: 518 - RNA, 19 nt, Artificial Sequence
  Description of Artificial Sequence:  siNA antisense region
ccagaacccuuccauucca

SEQ ID NO: 519 - RNA, 19 nt, Artificial Sequence
  Description of Artificial Sequence:  siNA antisense region
uucagcagguuggggcagc

SEQ ID NO: 520 - RNA, 19 nt, Artificial Sequence
  Description of Artificial Sequence:  siNA antisense region
cacccuccaccucugcccu

SEQ ID NO: 521 - RNA, 19 nt, Artificial Sequence
  Description of Artificial Sequence:  siNA antisense region
ucccuacucagcgcccccc

SEQ ID NO: 522 - RNA, 19 nt, Artificial Sequence
  Description of Artificial Sequence:  siNA antisense region
ggcaggcauggcccugagu

SEQ ID NO: 523 - RNA, 19 nt, Artificial Sequence
  Description of Artificial Sequence:  siNA antisense region
uuugaaugagaugaggggg

SEQ ID NO: 524 - RNA, 19 nt, Artificial Sequence
  Description of Artificial Sequence:  siNA antisense region
agggaaacuaggguggggu

SEQ ID NO: 525 - RNA, 19 nt, Artificial Sequence
  Description of Artificial Sequence:  siNA antisense region
acuaaggaauguuccuuca

SEQ ID NO: 526 - RNA, 19 nt, Artificial Sequence
  Description of Artificial Sequence:  siNA antisense region
gggaugcuagcccuugaga

SEQ ID NO: 527 - RNA, 19 nt, Artificial Sequence
  Description of Artificial Sequence:  siNA antisense region
gcccggccuggcuccucag

SEQ ID NO: 528 - RNA, 19 nt, Artificial Sequence
  Description of Artificial Sequence:  siNA antisense region
ugacagggaggggauucgg

SEQ ID NO: 529 - RNA, 19 nt, Artificial Sequence
  Description of Artificial Sequence:  siNA antisense region
cacgcgaagugacagcuuu

SEQ ID NO: 530 - RNA, 19 nt, Artificial Sequence
  Description of Artificial Sequence:  siNA antisense region
acacagaagcagcgagggc

SEQ ID NO: 531 - RNA, 19 nt, Artificial Sequence
  Description of Artificial Sequence:  siNA antisense region
uccacuucugcucaccaca

SEQ ID NO: 532 - RNA, 19 nt, Artificial Sequence
  Description of Artificial Sequence:  siNA antisense region
cucuccacgccccccagcu

SEQ ID NO: 533 - RNA, 19 nt, Artificial Sequence
  Description of Artificial Sequence:  siNA antisense region
gguggcaggggcgccgggc

SEQ ID NO: 534 - RNA, 19 nt, Artificial Sequence
  Description of Artificial Sequence:  siNA antisense region
uauuagacgggucagggag

SEQ ID NO: 535 - RNA, 19 nt, Artificial Sequence
  Description of Artificial Sequence:  siNA antisense region
cacaucucuauauuuauau

SEQ ID NO: 536 - RNA, 19 nt, Artificial Sequence
  Description of Artificial Sequence:  siNA antisense region
gccauagacacaucucuau

SEQ ID NO: 537 - RNA, 19 nt, Artificial Sequence
  Description of Artificial Sequence:  Target sequence/siNA sense region
uaauugcuugccaucauga

SEQ ID NO: 538 - RNA, 19 nt, Artificial Sequence
  Description of Artificial Sequence:  Target sequence/siNA sense region
agcagaagcaagcgugaca

SEQ ID NO: 539 - RNA, 19 nt, Artificial Sequence
  Description of Artificial Sequence:  Target sequence/siNA sense region
aacaauuuuuauaguguag

SEQ ID NO: 540 - RNA, 19 nt, Artificial Sequence
  Description of Artificial Sequence:  Target sequence/siNA sense region
gagauuggagauucuacau

SEQ ID NO: 541 - RNA, 19 nt, Artificial Sequence
  Description of Artificial Sequence:  Target sequence/siNA sense region
uucacaguccugaaacgau

SEQ ID NO: 542 - RNA, 19 nt, Artificial Sequence
  Description of Artificial Sequence:  Target sequence/siNA sense region
uaucagaauuuaaaaccua

SEQ ID NO: 543 - RNA, 19 nt, Artificial Sequence
  Description of Artificial Sequence:  Target sequence/siNA sense region
auaggcucaggagcucaag

SEQ ID NO: 544 - RNA, 19 nt, Artificial Sequence
  Description of Artificial Sequence:  Target sequence/siNA sense region
ggaauaguaugcgcagcuu

SEQ ID NO: 545 - RNA, 19 nt, Artificial Sequence
  Description of Artificial Sequence:  Target sequence/siNA sense region
uaugaugccauucuugaaa

SEQ ID NO: 546 - RNA, 19 nt, Artificial Sequence
  Description of Artificial Sequence:  Target sequence/siNA sense region
agaaauguugcaaucaaga

SEQ ID NO: 547 - RNA, 19 nt, Artificial Sequence
  Description of Artificial Sequence:  Target sequence/siNA sense region
aagcuaagccgaccauuuc

SEQ ID NO: 548 - RNA, 19 nt, Artificial Sequence
  Description of Artificial Sequence:  Target sequence/siNA sense region
cagaaucagacucaugcca

SEQ ID NO: 549 - RNA, 19 nt, Artificial Sequence
  Description of Artificial Sequence:  Target sequence/siNA sense region
aagcgggccuacagagagc

SEQ ID NO: 550 - RNA, 19 nt, Artificial Sequence
  Description of Artificial Sequence:  Target sequence/siNA sense region
cuaguucuuaugaaaugug

SEQ ID NO: 551 - RNA, 19 nt, Artificial Sequence
  Description of Artificial Sequence:  Target sequence/siNA sense region
guuaaucacaaaaauauaa

SEQ ID NO: 552 - RNA, 19 nt, Artificial Sequence
  Description of Artificial Sequence:  Target sequence/siNA sense region
auuggccuuuugaauguuu

SEQ ID NO: 553 - RNA, 19 nt, Artificial Sequence
  Description of Artificial Sequence:  Target sequence/siNA sense region
uucacaccacagaaauccc

SEQ ID NO: 554 - RNA, 19 nt, Artificial Sequence
  Description of Artificial Sequence:  Target sequence/siNA sense region
cuagaagaauuucaagaug

SEQ ID NO: 555 - RNA, 19 nt, Artificial Sequence
  Description of Artificial Sequence:  Target sequence/siNA sense region
guuuacauagucauggagc

SEQ ID NO: 556 - RNA, 19 nt, Artificial Sequence
  Description of Artificial Sequence:  Target sequence/siNA sense region
cucauggaugcaaaucuuu

SEQ ID NO: 557 - RNA, 19 nt, Artificial Sequence
  Description of Artificial Sequence:  Target sequence/siNA sense region
ugccaagugauucagaugg

SEQ ID NO: 558 - RNA, 19 nt, Artificial Sequence
  Description of Artificial Sequence:  Target sequence/siNA sense region
gagcuagaucaugaaagaa

SEQ ID NO: 559 - RNA, 19 nt, Artificial Sequence
  Description of Artificial Sequence:  Target sequence/siNA sense region
auguccuaccuucucuauc

SEQ ID NO: 560 - RNA, 19 nt, Artificial Sequence
  Description of Artificial Sequence:  Target sequence/siNA sense region
cagaugcuguguggaauca

SEQ ID NO: 561 - RNA, 19 nt, Artificial Sequence
  Description of Artificial Sequence:  Target sequence/siNA sense region
aagcaccuucauucugcug

SEQ ID NO: 562 - RNA, 19 nt, Artificial Sequence
  Description of Artificial Sequence:  Target sequence/siNA sense region
ggaauuauucaucgggacu

SEQ ID NO: 563 - RNA, 19 nt, Artificial Sequence
  Description of Artificial Sequence:  Target sequence/siNA sense region
uuaaagcccaguaauauag

SEQ ID NO: 564 - RNA, 19 nt, Artificial Sequence
  Description of Artificial Sequence:  Target sequence/siNA sense region
guaguaaaaucugauugca

SEQ ID NO: 565 - RNA, 19 nt, Artificial Sequence
  Description of Artificial Sequence:  Target sequence/siNA sense region
acuuugaagauucuugacu

SEQ ID NO: 566 - RNA, 19 nt, Artificial Sequence
  Description of Artificial Sequence:  Target sequence/siNA sense region
uucggucuggccaggacug

SEQ ID NO: 567 - RNA, 19 nt, Artificial Sequence
  Description of Artificial Sequence:  Target sequence/siNA sense region
gcaggaacgaguuuuauga

SEQ ID NO: 568 - RNA, 19 nt, Artificial Sequence
  Description of Artificial Sequence:  Target sequence/siNA sense region
augacgccuuauguaguga

SEQ ID NO: 569 - RNA, 19 nt, Artificial Sequence
  Description of Artificial Sequence:  Target sequence/siNA sense region
acucgcuacuacagagcac

SEQ ID NO: 570 - RNA, 19 nt, Artificial Sequence
  Description of Artificial Sequence:  Target sequence/siNA sense region
cccgaggucauccuuggca

SEQ ID NO: 571 - RNA, 19 nt, Artificial Sequence
  Description of Artificial Sequence:  Target sequence/siNA sense region
augggcuacaaggaaaacg

SEQ ID NO: 572 - RNA, 19 nt, Artificial Sequence
  Description of Artificial Sequence:  Target sequence/siNA sense region
guggauuuauggucugugg

SEQ ID NO: 573 - RNA, 19 nt, Artificial Sequence
  Description of Artificial Sequence:  Target sequence/siNA sense region
gggugcauuaugggagaaa

SEQ ID NO: 574 - RNA, 19 nt, Artificial Sequence
  Description of Artificial Sequence:  Target sequence/siNA sense region
augguuugccacaaaaucc

SEQ ID NO: 575 - RNA, 19 nt, Artificial Sequence
  Description of Artificial Sequence:  Target sequence/siNA sense region
cucuuuccaggaagggacu

SEQ ID NO: 576 - RNA, 19 nt, Artificial Sequence
  Description of Artificial Sequence:  Target sequence/siNA sense region
uauauugaucaguggaaua

SEQ ID NO: 577 - RNA, 19 nt, Artificial Sequence
  Description of Artificial Sequence:  Target sequence/siNA sense region
aaaguuauugaacagcuug

SEQ ID NO: 578 - RNA, 19 nt, Artificial Sequence
  Description of Artificial Sequence:  Target sequence/siNA sense region
ggaacaccauguccugaau

SEQ ID NO: 579 - RNA, 19 nt, Artificial Sequence
  Description of Artificial Sequence:  Target sequence/siNA sense region
uucaugaagaaacugcaac

SEQ ID NO: 580 - RNA, 19 nt, Artificial Sequence
  Description of Artificial Sequence:  Target sequence/siNA sense region
ccaacaguaaggacuuacg

SEQ ID NO: 581 - RNA, 19 nt, Artificial Sequence
  Description of Artificial Sequence:  Target sequence/siNA sense region
guugaaaacagaccuaaau

SEQ ID NO: 582 - RNA, 19 nt, Artificial Sequence
  Description of Artificial Sequence:  Target sequence/siNA sense region
uaugcuggauauagcuuug

SEQ ID NO: 583 - RNA, 19 nt, Artificial Sequence
  Description of Artificial Sequence:  Target sequence/siNA sense region
gagaaacucuucccugaug

SEQ ID NO: 584 - RNA, 19 nt, Artificial Sequence
  Description of Artificial Sequence:  Target sequence/siNA sense region
guccuuuucccagcugacu

SEQ ID NO: 585 - RNA, 19 nt, Artificial Sequence
  Description of Artificial Sequence:  Target sequence/siNA sense region
ucagaacacaacaaacuua

SEQ ID NO: 586 - RNA, 19 nt, Artificial Sequence
  Description of Artificial Sequence:  Target sequence/siNA sense region
aaagccagucaggcaaggg

SEQ ID NO: 587 - RNA, 19 nt, Artificial Sequence
  Description of Artificial Sequence:  Target sequence/siNA sense region
gauuuguuauccaaaaugc

SEQ ID NO: 588 - RNA, 19 nt, Artificial Sequence
  Description of Artificial Sequence:  Target sequence/siNA sense region
cugguaauagaugcaucua

SEQ ID NO: 589 - RNA, 19 nt, Artificial Sequence
  Description of Artificial Sequence:  Target sequence/siNA sense region
aaaaggaucucuguagaug

SEQ ID NO: 590 - RNA, 19 nt, Artificial Sequence
  Description of Artificial Sequence:  Target sequence/siNA sense region
gaagcucuccaacacccgu

SEQ ID NO: 591 - RNA, 19 nt, Artificial Sequence
  Description of Artificial Sequence:  Target sequence/siNA sense region
uacaucaaugucugguaug

SEQ ID NO: 592 - RNA, 19 nt, Artificial Sequence
  Description of Artificial Sequence:  Target sequence/siNA sense region
gauccuucugaagcagaag

SEQ ID NO: 593 - RNA, 19 nt, Artificial Sequence
  Description of Artificial Sequence:  Target sequence/siNA sense region
gcuccaccaccaaagaucc

SEQ ID NO: 594 - RNA, 19 nt, Artificial Sequence
  Description of Artificial Sequence:  Target sequence/siNA sense region
ccugacaagcaguuagaug

SEQ ID NO: 595 - RNA, 19 nt, Artificial Sequence
  Description of Artificial Sequence:  Target sequence/siNA sense region
gaaagggaacacacaauag

SEQ ID NO: 596 - RNA, 19 nt, Artificial Sequence
  Description of Artificial Sequence:  Target sequence/siNA sense region
gaagaguggaaagaauuga

SEQ ID NO: 597 - RNA, 19 nt, Artificial Sequence
  Description of Artificial Sequence:  Target sequence/siNA sense region
auauauaaggaaguuaugg

SEQ ID NO: 598 - RNA, 19 nt, Artificial Sequence
  Description of Artificial Sequence:  Target sequence/siNA sense region
gacuuggaggagagaacca

SEQ ID NO: 599 - RNA, 19 nt, Artificial Sequence
  Description of Artificial Sequence:  Target sequence/siNA sense region
aagaauggaguuauacggg

SEQ ID NO: 600 - RNA, 19 nt, Artificial Sequence
  Description of Artificial Sequence:  Target sequence/siNA sense region
gggcagcccucuccuuuag

SEQ ID NO: 601 - RNA, 19 nt, Artificial Sequence
  Description of Artificial Sequence:  Target sequence/siNA sense region
gcacaggugcagcagugau

SEQ ID NO: 602 - RNA, 19 nt, Artificial Sequence
  Description of Artificial Sequence:  Target sequence/siNA sense region
ucaauggcucucagcaucc

SEQ ID NO: 603 - RNA, 19 nt, Artificial Sequence
  Description of Artificial Sequence:  Target sequence/siNA sense region
caucaucaucgucgucugu

SEQ ID NO: 604 - RNA, 19 nt, Artificial Sequence
  Description of Artificial Sequence:  Target sequence/siNA sense region
ucaaugaugugucuucaau

SEQ ID NO: 605 - RNA, 19 nt, Artificial Sequence
  Description of Artificial Sequence:  Target sequence/siNA sense region
ugucaacagauccgacuuu

SEQ ID NO: 606 - RNA, 19 nt, Artificial Sequence
  Description of Artificial Sequence:  Target sequence/siNA sense region
uggccucugauacagacag

SEQ ID NO: 607 - RNA, 19 nt, Artificial Sequence
  Description of Artificial Sequence:  Target sequence/siNA sense region
gcagucuagaagcagcagc

SEQ ID NO: 608 - RNA, 19 nt, Artificial Sequence
  Description of Artificial Sequence:  Target sequence/siNA sense region
cugggccucugggcugcug

SEQ ID NO: 609 - RNA, 19 nt, Artificial Sequence
  Description of Artificial Sequence:  Target sequence/siNA sense region
guagaugacuacuugggcc

SEQ ID NO: 610 - RNA, 19 nt, Artificial Sequence
  Description of Artificial Sequence:  Target sequence/siNA sense region
caucggggggugggaggga

SEQ ID NO: 611 - RNA, 19 nt, Artificial Sequence
  Description of Artificial Sequence:  Target sequence/siNA sense region
auggggagucgguuaguca

SEQ ID NO: 612 - RNA, 19 nt, Artificial Sequence
  Description of Artificial Sequence:  Target sequence/siNA sense region
auugauagaacuacuuuga

SEQ ID NO: 613 - RNA, 19 nt, Artificial Sequence
  Description of Artificial Sequence:  Target sequence/siNA sense region
aaaacaauucaguggucuu

SEQ ID NO: 614 - RNA, 19 nt, Artificial Sequence
  Description of Artificial Sequence:  Target sequence/siNA sense region
uauuuuugggugauuuuuc

SEQ ID NO: 615 - RNA, 19 nt, Artificial Sequence
  Description of Artificial Sequence:  Target sequence/siNA sense region
ggugauuuuucaaaaaaug

SEQ ID NO: 616 - RNA, 19 nt, Artificial Sequence
  Description of Artificial Sequence:  siNA antisense region
ucaugauggcaagcaauua

SEQ ID NO: 617 - RNA, 19 nt, Artificial Sequence
  Description of Artificial Sequence:  siNA antisense region
ugucacgcuugcuucugcu

SEQ ID NO: 618 - RNA, 19 nt, Artificial Sequence
  Description of Artificial Sequence:  siNA antisense region
cuacacuauaaaaauuguu

SEQ ID NO: 619 - RNA, 19 nt, Artificial Sequence
  Description of Artificial Sequence:  siNA antisense region
auguagaaucuccaaucuc

SEQ ID NO: 620 - RNA, 19 nt, Artificial Sequence
  Description of Artificial Sequence:  siNA antisense region
aucguuucaggacugugaa

SEQ ID NO: 621 - RNA, 19 nt, Artificial Sequence
  Description of Artificial Sequence:  siNA antisense region
uagguuuuaaauucugaua

SEQ ID NO: 622 - RNA, 19 nt, Artificial Sequence
  Description of Artificial Sequence:  siNA antisense region
cuugagcuccugagccuau

SEQ ID NO: 623 - RNA, 19 nt, Artificial Sequence
  Description of Artificial Sequence:  siNA antisense region
aagcugcgcauacuauucc

SEQ ID NO: 624 - RNA, 19 nt, Artificial Sequence
  Description of Artificial Sequence:  siNA antisense region
uuucaagaauggcaucaua

SEQ ID NO: 625 - RNA, 19 nt, Artificial Sequence
  Description of Artificial Sequence:  siNA antisense region
ucuugauugcaacauuucu

SEQ ID NO: 626 - RNA, 19 nt, Artificial Sequence
  Description of Artificial Sequence:  siNA antisense region
gaaauggucggcuuagcuu

SEQ ID NO: 627 - RNA, 19 nt, Artificial Sequence
  Description of Artificial Sequence:  siNA antisense region
uggcaugagucugauucug

SEQ ID NO: 628 - RNA, 19 nt, Artificial Sequence
  Description of Artificial Sequence:  siNA antisense region
gcucucuguaggcccgcuu

SEQ ID NO: 629 - RNA, 19 nt, Artificial Sequence
  Description of Artificial Sequence:  siNA antisense region
cacauuucauaagaacuag

SEQ ID NO: 630 - RNA, 19 nt, Artificial Sequence
  Description of Artificial Sequence:  siNA antisense region
uuauauuuuugugauuaac

SEQ ID NO: 631 - RNA, 19 nt, Artificial Sequence
  Description of Artificial Sequence:  siNA antisense region
aaacauucaaaaggccaau

SEQ ID NO: 632 - RNA, 19 nt, Artificial Sequence
  Description of Artificial Sequence:  siNA antisense region
gggauuucuguggugugaa

SEQ ID NO: 633 - RNA, 19 nt, Artificial Sequence
  Description of Artificial Sequence:  siNA antisense region
caucuugaaauucuucuag

SEQ ID NO: 634 - RNA, 19 nt, Artificial Sequence
  Description of Artificial Sequence:  siNA antisense region
gcuccaugacuauguaaac

SEQ ID NO: 635 - RNA, 19 nt, Artificial Sequence
  Description of Artificial Sequence:  siNA antisense region
aaagauuugcauccaugag

SEQ ID NO: 636 - RNA, 19 nt, Artificial Sequence
  Description of Artificial Sequence:  siNA antisense region
ccaucugaaucacuuggca

SEQ ID NO: 637 - RNA, 19 nt, Artificial Sequence
  Description of Artificial Sequence:  siNA antisense region
uucuuucaugaucuagcuc

SEQ ID NO: 638 - RNA, 19 nt, Artificial Sequence
  Description of Artificial Sequence:  siNA antisense region
gauagagaagguaggacau

SEQ ID NO: 639 - RNA, 19 nt, Artificial Sequence
  Description of Artificial Sequence:  siNA antisense region
ugauuccacacagcaucug

SEQ ID NO: 640 - RNA, 19 nt, Artificial Sequence
  Description of Artificial Sequence:  siNA antisense region
cagcagaaugaaggugcuu

SEQ ID NO: 641 - RNA, 19 nt, Artificial Sequence
  Description of Artificial Sequence:  siNA antisense region
agucccgaugaauaauucc

SEQ ID NO: 642 - RNA, 19 nt, Artificial Sequence
  Description of Artificial Sequence:  siNA antisense region
cuauauuacugggcuuuaa

SEQ ID NO: 643 - RNA, 19 nt, Artificial Sequence
  Description of Artificial Sequence:  siNA antisense region
ugcaaucagauuuuacuac

SEQ ID NO: 644 - RNA, 19 nt, Artificial Sequence
  Description of Artificial Sequence:  siNA antisense region
agucaagaaucuucaaagu

SEQ ID NO: 645 - RNA, 19 nt, Artificial Sequence
  Description of Artificial Sequence:  siNA antisense region
caguccuggccagaccgaa

SEQ ID NO: 646 - RNA, 19 nt, Artificial Sequence
  Description of Artificial Sequence:  siNA antisense region
ucauaaaacucguuccugc

SEQ ID NO: 647 - RNA, 19 nt, Artificial Sequence
  Description of Artificial Sequence:  siNA antisense region
ucacuacauaaggcgucau

SEQ ID NO: 648 - RNA, 19 nt, Artificial Sequence
  Description of Artificial Sequence:  siNA antisense region
gugcucuguaguagcgagu

SEQ ID NO: 649 - RNA, 19 nt, Artificial Sequence
  Description of Artificial Sequence:  siNA antisense region
ugccaaggaugaccucggg

SEQ ID NO: 650 - RNA, 19 nt, Artificial Sequence
  Description of Artificial Sequence:  siNA antisense region
cguuuuccuuguagcccau

SEQ ID NO: 651 - RNA, 19 nt, Artificial Sequence
  Description of Artificial Sequence:  siNA antisense region
ccacagaccauaaauccac

SEQ ID NO: 652 - RNA, 19 nt, Artificial Sequence
  Description of Artificial Sequence:  siNA antisense region
uuucucccauaaugcaccc

SEQ ID NO: 653 - RNA, 19 nt, Artificial Sequence
  Description of Artificial Sequence:  siNA antisense region
ggauuuuguggcaaaccau

SEQ ID NO: 654 - RNA, 19 nt, Artificial Sequence
  Description of Artificial Sequence:  siNA antisense region
agucccuuccuggaaagag

SEQ ID NO: 655 - RNA, 19 nt, Artificial Sequence
  Description of Artificial Sequence:  siNA antisense region
uauuccacugaucaauaua

SEQ ID NO: 656 - RNA, 19 nt, Artificial Sequence
  Description of Artificial Sequence:  siNA antisense region
caagcuguucaauaacuuu

SEQ ID NO: 657 - RNA, 19 nt, Artificial Sequence
  Description of Artificial Sequence:  siNA antisense region
auucaggacaugguguucc

SEQ ID NO: 658 - RNA, 19 nt, Artificial Sequence
  Description of Artificial Sequence:  siNA antisense region
guugcaguuucuucaugaa

SEQ ID NO: 659 - RNA, 19 nt, Artificial Sequence
  Description of Artificial Sequence:  siNA antisense region
cguaaguccuuacuguugg

SEQ ID NO: 660 - RNA, 19 nt, Artificial Sequence
  Description of Artificial Sequence:  siNA antisense region
auuuaggucuguuuucaac

SEQ ID NO: 661 - RNA, 19 nt, Artificial Sequence
  Description of Artificial Sequence:  siNA antisense region
caaagcuauauccagcaua

SEQ ID NO: 662 - RNA, 19 nt, Artificial Sequence
  Description of Artificial Sequence:  siNA antisense region
caucagggaagaguuucuc

SEQ ID NO: 663 - RNA, 19 nt, Artificial Sequence
  Description of Artificial Sequence:  siNA antisense region
agucagcugggaaaaggac

SEQ ID NO: 664 - RNA, 19 nt, Artificial Sequence
  Description of Artificial Sequence:  siNA antisense region
uaaguuuguuguguucuga

SEQ ID NO: 665 - RNA, 19 nt, Artificial Sequence
  Description of Artificial Sequence:  siNA antisense region
cccuugccugacuggcuuu

SEQ ID NO: 666 - RNA, 19 nt, Artificial Sequence
  Description of Artificial Sequence:  siNA antisense region
gcauuuuggauaacaaauc

SEQ ID NO: 667 - RNA, 19 nt, Artificial Sequence
  Description of Artificial Sequence:  siNA antisense region
uagaugcaucuauuaccag

SEQ ID NO: 668 - RNA, 19 nt, Artificial Sequence
  Description of Artificial Sequence:  siNA antisense region
caucuacagagauccuuuu

SEQ ID NO: 669 - RNA, 19 nt, Artificial Sequence
  Description of Artificial Sequence:  siNA antisense region
acggguguuggagagcuuc

SEQ ID NO: 670 - RNA, 19 nt, Artificial Sequence
  Description of Artificial Sequence:  siNA antisense region
cauaccagacauugaugua

SEQ ID NO: 671 - RNA, 19 nt, Artificial Sequence
  Description of Artificial Sequence:  siNA antisense region
cuucugcuucagaaggauc

SEQ ID NO: 672 - RNA, 19 nt, Artificial Sequence
  Description of Artificial Sequence:  siNA antisense region
ggaucuuuggugguggagc

SEQ ID NO: 673 - RNA, 19 nt, Artificial Sequence
  Description of Artificial Sequence:  siNA antisense region
caucuaacugcuugucagg

SEQ ID NO: 674 - RNA, 19 nt, Artificial Sequence
  Description of Artificial Sequence:  siNA antisense region
cuauuguguguucccuuuc

SEQ ID NO: 675 - RNA, 19 nt, Artificial Sequence
  Description of Artificial Sequence:  siNA antisense region
ucaauucuuuccacucuuc

SEQ ID NO: 676 - RNA, 19 nt, Artificial Sequence
  Description of Artificial Sequence:  siNA antisense region
ccauaacuuccuuauauau

SEQ ID NO: 677 - RNA, 19 nt, Artificial Sequence
  Description of Artificial Sequence:  siNA antisense region
ugguucucuccuccaaguc

SEQ ID NO: 678 - RNA, 19 nt, Artificial Sequence
  Description of Artificial Sequence:  siNA antisense region
cccguauaacuccauucuu

SEQ ID NO: 679 - RNA, 19 nt, Artificial Sequence
  Description of Artificial Sequence:  siNA antisense region
cuaaaggagagggcugccc

SEQ ID NO: 680 - RNA, 19 nt, Artificial Sequence
  Description of Artificial Sequence:  siNA antisense region
aucacugcugcaccugugc

SEQ ID NO: 681 - RNA, 19 nt, Artificial Sequence
  Description of Artificial Sequence:  siNA antisense region
ggaugcugagagccauuga

SEQ ID NO: 682 - RNA, 19 nt, Artificial Sequence
  Description of Artificial Sequence:  siNA antisense region
acagacgacgaugaugaug

SEQ ID NO: 683 - RNA, 19 nt, Artificial Sequence
  Description of Artificial Sequence:  siNA antisense region
auugaagacacaucauuga

SEQ ID NO: 684 - RNA, 19 nt, Artificial Sequence
  Description of Artificial Sequence:  siNA antisense region
aaagucggaucuguugaca

SEQ ID NO: 685 - RNA, 19 nt, Artificial Sequence
  Description of Artificial Sequence:  siNA antisense region
cugucuguaucagaggcca

SEQ ID NO: 686 - RNA, 19 nt, Artificial Sequence
  Description of Artificial Sequence:  siNA antisense region
gcugcugcuucuagacugc

SEQ ID NO: 687 - RNA, 19 nt, Artificial Sequence
  Description of Artificial Sequence:  siNA antisense region
cagcagcccagaggcccag

SEQ ID NO: 688 - RNA, 19 nt, Artificial Sequence
  Description of Artificial Sequence:  siNA antisense region
ggcccaaguagucaucuac

SEQ ID NO: 689 - RNA, 19 nt, Artificial Sequence
  Description of Artificial Sequence:  siNA antisense region
ucccucccaccccccgaug

SEQ ID NO: 690 - RNA, 19 nt, Artificial Sequence
  Description of Artificial Sequence:  siNA antisense region
ugacuaaccgacuccccau

SEQ ID NO: 691 - RNA, 19 nt, Artificial Sequence
  Description of Artificial Sequence:  siNA antisense region
ucaaaguaguucuaucaau

SEQ ID NO: 692 - RNA, 19 nt, Artificial Sequence
  Description of Artificial Sequence:  siNA antisense region
aagaccacugaauuguuuu

SEQ ID NO: 693 - RNA, 19 nt, Artificial Sequence
  Description of Artificial Sequence:  siNA antisense region
gaaaaaucacccaaaaaua

SEQ ID NO: 694 - RNA, 19 nt, Artificial Sequence
  Description of Artificial Sequence:  siNA antisense region
cauuuuuugaaaaaucacc

SEQ ID NO: 695 - RNA, 19 nt, Artificial Sequence
  Description of Artificial Sequence:  Target sequence/siNA sense region
aaccgcgaccacuggagcc

SEQ ID NO: 696 - RNA, 19 nt, Artificial Sequence
  Description of Artificial Sequence:  Target sequence/siNA sense region
cuuagcgggcgcagcagcu

SEQ ID NO: 697 - RNA, 19 nt, Artificial Sequence
  Description of Artificial Sequence:  Target sequence/siNA sense region
uggaacgggaguacugcga

SEQ ID NO: 698 - RNA, 19 nt, Artificial Sequence
  Description of Artificial Sequence:  Target sequence/siNA sense region
acgcagcccggagucggcc

SEQ ID NO: 699 - RNA, 19 nt, Artificial Sequence
  Description of Artificial Sequence:  Target sequence/siNA sense region
cuuguaggggcgaaggugc

SEQ ID NO: 700 - RNA, 19 nt, Artificial Sequence
  Description of Artificial Sequence:  Target sequence/siNA sense region
cagggagaucgcggcgggc

SEQ ID NO: 701 - RNA, 19 nt, Artificial Sequence
  Description of Artificial Sequence:  Target sequence/siNA sense region
cgcagucuugagcgccgga

SEQ ID NO: 702 - RNA, 19 nt, Artificial Sequence
  Description of Artificial Sequence:  Target sequence/siNA sense region
agcgcgucccugcccuuag

SEQ ID NO: 703 - RNA, 19 nt, Artificial Sequence
  Description of Artificial Sequence:  Target sequence/siNA sense region
gcggggcuugccccagucg

SEQ ID NO: 704 - RNA, 19 nt, Artificial Sequence
  Description of Artificial Sequence:  Target sequence/siNA sense region
gcaggggcacauccagccg

SEQ ID NO: 705 - RNA, 19 nt, Artificial Sequence
  Description of Artificial Sequence:  Target sequence/siNA sense region
gcugcggcugacagcagcc

SEQ ID NO: 706 - RNA, 19 nt, Artificial Sequence
  Description of Artificial Sequence:  Target sequence/siNA sense region
cgcgcgcgcgggagucugc

SEQ ID NO: 707 - RNA, 19 nt, Artificial Sequence
  Description of Artificial Sequence:  Target sequence/siNA sense region
cggggucgcggcagccgca

SEQ ID NO: 708 - RNA, 19 nt, Artificial Sequence
  Description of Artificial Sequence:  Target sequence/siNA sense region
accugcgcgggcgaccagc

SEQ ID NO: 709 - RNA, 19 nt, Artificial Sequence
  Description of Artificial Sequence:  Target sequence/siNA sense region
cgcaagguccccgcccggc

SEQ ID NO: 710 - RNA, 19 nt, Artificial Sequence
  Description of Artificial Sequence:  Target sequence/siNA sense region
cugggcgggcagcaagggc

SEQ ID NO: 711 - RNA, 19 nt, Artificial Sequence
  Description of Artificial Sequence:  Target sequence/siNA sense region
ccggggagagggugcgggu

SEQ ID NO: 712 - RNA, 19 nt, Artificial Sequence
  Description of Artificial Sequence:  Target sequence/siNA sense region
ugcaggcgggggccccaca

SEQ ID NO: 713 - RNA, 19 nt, Artificial Sequence
  Description of Artificial Sequence:  Target sequence/siNA sense region
agggccaccuucuugcccg

SEQ ID NO: 714 - RNA, 19 nt, Artificial Sequence
  Description of Artificial Sequence:  Target sequence/siNA sense region
ggcggcugccgcuggaaaa

SEQ ID NO: 715 - RNA, 19 nt, Artificial Sequence
  Description of Artificial Sequence:  Target sequence/siNA sense region
augucucaggagaggccca

SEQ ID NO: 716 - RNA, 19 nt, Artificial Sequence
  Description of Artificial Sequence:  Target sequence/siNA sense region
acguucuaccggcaggagc

SEQ ID NO: 717 - RNA, 19 nt, Artificial Sequence
  Description of Artificial Sequence:  Target sequence/siNA sense region
cugaacaagacaaucuggg

SEQ ID NO: 718 - RNA, 19 nt, Artificial Sequence
  Description of Artificial Sequence:  Target sequence/siNA sense region
gaggugcccgagcguuacc

SEQ ID NO: 719 - RNA, 19 nt, Artificial Sequence
  Description of Artificial Sequence:  Target sequence/siNA sense region
cagaaccugucuccagugg

SEQ ID NO: 720 - RNA, 19 nt, Artificial Sequence
  Description of Artificial Sequence:  Target sequence/siNA sense region
ggcucuggcgccuauggcu

SEQ ID NO: 721 - RNA, 19 nt, Artificial Sequence
  Description of Artificial Sequence:  Target sequence/siNA sense region
ucugugugugcugcuuuug

SEQ ID NO: 722 - RNA, 19 nt, Artificial Sequence
  Description of Artificial Sequence:  Target sequence/siNA sense region
gacacaaaaacgggguuac

SEQ ID NO: 723 - RNA, 19 nt, Artificial Sequence
  Description of Artificial Sequence:  Target sequence/siNA sense region
cguguggcagugaagaagc

SEQ ID NO: 724 - RNA, 19 nt, Artificial Sequence
  Description of Artificial Sequence:  Target sequence/siNA sense region
cucuccagaccauuucagu

SEQ ID NO: 725 - RNA, 19 nt, Artificial Sequence
  Description of Artificial Sequence:  Target sequence/siNA sense region
uccaucauucaugcgaaaa

SEQ ID NO: 726 - RNA, 19 nt, Artificial Sequence
  Description of Artificial Sequence:  Target sequence/siNA sense region
agaaccuacagagaacugc

SEQ ID NO: 727 - RNA, 19 nt, Artificial Sequence
  Description of Artificial Sequence:  Target sequence/siNA sense region
cgguuacuuaaacauauga

SEQ ID NO: 728 - RNA, 19 nt, Artificial Sequence
  Description of Artificial Sequence:  Target sequence/siNA sense region
aaacaugaaaaugugauug

SEQ ID NO: 729 - RNA, 19 nt, Artificial Sequence
  Description of Artificial Sequence:  Target sequence/siNA sense region
ggucuguuggacguuuuua

SEQ ID NO: 730 - RNA, 19 nt, Artificial Sequence
  Description of Artificial Sequence:  Target sequence/siNA sense region
acaccugcaaggucucugg

SEQ ID NO: 731 - RNA, 19 nt, Artificial Sequence
  Description of Artificial Sequence:  Target sequence/siNA sense region
gaggaauucaaugaugugu

SEQ ID NO: 732 - RNA, 19 nt, Artificial Sequence
  Description of Artificial Sequence:  Target sequence/siNA sense region
uaucuggugacccaucuca

SEQ ID NO: 733 - RNA, 19 nt, Artificial Sequence
  Description of Artificial Sequence:  Target sequence/siNA sense region
augggggcagaucugaaca

SEQ ID NO: 734 - RNA, 19 nt, Artificial Sequence
  Description of Artificial Sequence:  Target sequence/siNA sense region
aacauugugaaaugucaga

SEQ ID NO: 735 - RNA, 19 nt, Artificial Sequence
  Description of Artificial Sequence:  Target sequence/siNA sense region
aagcuuacagaugaccaug

SEQ ID NO: 736 - RNA, 19 nt, Artificial Sequence
  Description of Artificial Sequence:  Target sequence/siNA sense region
guucaguuccuuaucuacc

SEQ ID NO: 737 - RNA, 19 nt, Artificial Sequence
  Description of Artificial Sequence:  Target sequence/siNA sense region
caaauucuccgaggucuaa

SEQ ID NO: 738 - RNA, 19 nt, Artificial Sequence
  Description of Artificial Sequence:  Target sequence/siNA sense region
aaguauauacauucagcug

SEQ ID NO: 739 - RNA, 19 nt, Artificial Sequence
  Description of Artificial Sequence:  Target sequence/siNA sense region
gacauaauucacagggacc

SEQ ID NO: 740 - RNA, 19 nt, Artificial Sequence
  Description of Artificial Sequence:  Target sequence/siNA sense region
cuaaaaccuaguaaucuag

SEQ ID NO: 741 - RNA, 19 nt, Artificial Sequence
  Description of Artificial Sequence:  Target sequence/siNA sense region
gcugugaaugaagacugug

SEQ ID NO: 742 - RNA, 19 nt, Artificial Sequence
  Description of Artificial Sequence:  Target sequence/siNA sense region
gagcugaagauucuggauu

SEQ ID NO: 743 - RNA, 19 nt, Artificial Sequence
  Description of Artificial Sequence:  Target sequence/siNA sense region
uuuggacuggcucggcaca

SEQ ID NO: 744 - RNA, 19 nt, Artificial Sequence
  Description of Artificial Sequence:  Target sequence/siNA sense region
acagaugaugaaaugacag

SEQ ID NO: 745 - RNA, 19 nt, Artificial Sequence
  Description of Artificial Sequence:  Target sequence/siNA sense region
ggcuacguggccacuaggu

SEQ ID NO: 746 - RNA, 19 nt, Artificial Sequence
  Description of Artificial Sequence:  Target sequence/siNA sense region
ugguacagggcuccugaga

SEQ ID NO: 747 - RNA, 19 nt, Artificial Sequence
  Description of Artificial Sequence:  Target sequence/siNA sense region
aucaugcugaacuggaugc

SEQ ID NO: 748 - RNA, 19 nt, Artificial Sequence
  Description of Artificial Sequence:  Target sequence/siNA sense region
cauuacaaccagacaguug

SEQ ID NO: 749 - RNA, 19 nt, Artificial Sequence
  Description of Artificial Sequence:  Target sequence/siNA sense region
gauauuuggucagugggau

SEQ ID NO: 750 - RNA, 19 nt, Artificial Sequence
  Description of Artificial Sequence:  Target sequence/siNA sense region
ugcauaauggccgagcugu

SEQ ID NO: 751 - RNA, 19 nt, Artificial Sequence
  Description of Artificial Sequence:  Target sequence/siNA sense region
uugacuggaagaacauugu

SEQ ID NO: 752 - RNA, 19 nt, Artificial Sequence
  Description of Artificial Sequence:  Target sequence/siNA sense region
uuuccugguacagaccaua

SEQ ID NO: 753 - RNA, 19 nt, Artificial Sequence
  Description of Artificial Sequence:  Target sequence/siNA sense region
auugaucaguugaagcuca

SEQ ID NO: 754 - RNA, 19 nt, Artificial Sequence
  Description of Artificial Sequence:  Target sequence/siNA sense region
auuuuaagacucguuggaa

SEQ ID NO: 755 - RNA, 19 nt, Artificial Sequence
  Description of Artificial Sequence:  Target sequence/siNA sense region
accccaggggcugagcuuu

SEQ ID NO: 756 - RNA, 19 nt, Artificial Sequence
  Description of Artificial Sequence:  Target sequence/siNA sense region
uugaagaaaaucuccucag

SEQ ID NO: 757 - RNA, 19 nt, Artificial Sequence
  Description of Artificial Sequence:  Target sequence/siNA sense region
gagucugcaagaaacuaua

SEQ ID NO: 758 - RNA, 19 nt, Artificial Sequence
  Description of Artificial Sequence:  Target sequence/siNA sense region
auucagucuuugacucaga

SEQ ID NO: 759 - RNA, 19 nt, Artificial Sequence
  Description of Artificial Sequence:  Target sequence/siNA sense region
augccgaagaugaacuuug

SEQ ID NO: 760 - RNA, 19 nt, Artificial Sequence
  Description of Artificial Sequence:  Target sequence/siNA sense region
gcgaauguauuuauuggug

SEQ ID NO: 761 - RNA, 19 nt, Artificial Sequence
  Description of Artificial Sequence:  Target sequence/siNA sense region
gccaauccccuggcugucg

SEQ ID NO: 762 - RNA, 19 nt, Artificial Sequence
  Description of Artificial Sequence:  Target sequence/siNA sense region
gacuugcuggagaagaugc

SEQ ID NO: 763 - RNA, 19 nt, Artificial Sequence
  Description of Artificial Sequence:  Target sequence/siNA sense region
cuuguauuggacucagaua

SEQ ID NO: 764 - RNA, 19 nt, Artificial Sequence
  Description of Artificial Sequence:  Target sequence/siNA sense region
aagagaauuacagcggccc

SEQ ID NO: 765 - RNA, 19 nt, Artificial Sequence
  Description of Artificial Sequence:  Target sequence/siNA sense region
caagcccuugcacaugccu

SEQ ID NO: 766 - RNA, 19 nt, Artificial Sequence
  Description of Artificial Sequence:  Target sequence/siNA sense region
uacuuugcucaguaccacg

SEQ ID NO: 767 - RNA, 19 nt, Artificial Sequence
  Description of Artificial Sequence:  Target sequence/siNA sense region
gauccugaugaugaaccag

SEQ ID NO: 768 - RNA, 19 nt, Artificial Sequence
  Description of Artificial Sequence:  Target sequence/siNA sense region
guggccgauccuuaugauc

SEQ ID NO: 769 - RNA, 19 nt, Artificial Sequence
  Description of Artificial Sequence:  Target sequence/siNA sense region
caguccuuugaaagcaggg

SEQ ID NO: 770 - RNA, 19 nt, Artificial Sequence
  Description of Artificial Sequence:  Target sequence/siNA sense region
gaccuccuuauagaugagu

SEQ ID NO: 771 - RNA, 19 nt, Artificial Sequence
  Description of Artificial Sequence:  Target sequence/siNA sense region
uggaaaagccugaccuaug

SEQ ID NO: 772 - RNA, 19 nt, Artificial Sequence
  Description of Artificial Sequence:  Target sequence/siNA sense region
gaugaagucaucagcuuug

SEQ ID NO: 773 - RNA, 19 nt, Artificial Sequence
  Description of Artificial Sequence:  Target sequence/siNA sense region
gugccaccaccccuugacc

SEQ ID NO: 774 - RNA, 19 nt, Artificial Sequence
  Description of Artificial Sequence:  Target sequence/siNA sense region
caagaagagauggaguccu

SEQ ID NO: 775 - RNA, 19 nt, Artificial Sequence
  Description of Artificial Sequence:  Target sequence/siNA sense region
ugagcaccugguuucuguu

SEQ ID NO: 776 - RNA, 19 nt, Artificial Sequence
  Description of Artificial Sequence:  Target sequence/siNA sense region
ucuguugaucccacuucac

SEQ ID NO: 777 - RNA, 19 nt, Artificial Sequence
  Description of Artificial Sequence:  Target sequence/siNA sense region
cugugaggggaaggccuuu

SEQ ID NO: 778 - RNA, 19 nt, Artificial Sequence
  Description of Artificial Sequence:  Target sequence/siNA sense region
uucacgggaacucuccaaa

SEQ ID NO: 779 - RNA, 19 nt, Artificial Sequence
  Description of Artificial Sequence:  Target sequence/siNA sense region
auauuauucaagugccucu

SEQ ID NO: 780 - RNA, 19 nt, Artificial Sequence
  Description of Artificial Sequence:  Target sequence/siNA sense region
uuguugcagagauuuccuc

SEQ ID NO: 781 - RNA, 19 nt, Artificial Sequence
  Description of Artificial Sequence:  Target sequence/siNA sense region
ccaugguggaagggggugu

SEQ ID NO: 782 - RNA, 19 nt, Artificial Sequence
  Description of Artificial Sequence:  Target sequence/siNA sense region
ugcgugcgugugcgugcgu

SEQ ID NO: 783 - RNA, 19 nt, Artificial Sequence
  Description of Artificial Sequence:  Target sequence/siNA sense region
uguuagugugugugcaugu

SEQ ID NO: 784 - RNA, 19 nt, Artificial Sequence
  Description of Artificial Sequence:  Target sequence/siNA sense region
ugugugucugucuuugugg

SEQ ID NO: 785 - RNA, 19 nt, Artificial Sequence
  Description of Artificial Sequence:  Target sequence/siNA sense region
ggaggguaagacaauauga

SEQ ID NO: 786 - RNA, 19 nt, Artificial Sequence
  Description of Artificial Sequence:  Target sequence/siNA sense region
aacaaacuaugaucacagu

SEQ ID NO: 787 - RNA, 19 nt, Artificial Sequence
  Description of Artificial Sequence:  Target sequence/siNA sense region
ugacuuuacaggagguugu

SEQ ID NO: 788 - RNA, 19 nt, Artificial Sequence
  Description of Artificial Sequence:  Target sequence/siNA sense region
uggaugcuccagggcagcc

SEQ ID NO: 789 - RNA, 19 nt, Artificial Sequence
  Description of Artificial Sequence:  Target sequence/siNA sense region
cuccaccuugcucuucuuu

SEQ ID NO: 790 - RNA, 19 nt, Artificial Sequence
  Description of Artificial Sequence:  Target sequence/siNA sense region
ucugagaguuggcucaggc

SEQ ID NO: 791 - RNA, 19 nt, Artificial Sequence
  Description of Artificial Sequence:  Target sequence/siNA sense region
cagacaagagcugcugucc

SEQ ID NO: 792 - RNA, 19 nt, Artificial Sequence
  Description of Artificial Sequence:  Target sequence/siNA sense region
cuuuuaggaauauguucaa

SEQ ID NO: 793 - RNA, 19 nt, Artificial Sequence
  Description of Artificial Sequence:  Target sequence/siNA sense region
augcaaaguaaaaaaauau

SEQ ID NO: 794 - RNA, 19 nt, Artificial Sequence
  Description of Artificial Sequence:  Target sequence/siNA sense region
ugaauuguccccaaucccg

SEQ ID NO: 795 - RNA, 19 nt, Artificial Sequence
  Description of Artificial Sequence:  Target sequence/siNA sense region
ggucaugcuuuugccacuu

SEQ ID NO: 796 - RNA, 19 nt, Artificial Sequence
  Description of Artificial Sequence:  Target sequence/siNA sense region
uuggcuucuccugugaccc

SEQ ID NO: 797 - RNA, 19 nt, Artificial Sequence
  Description of Artificial Sequence:  Target sequence/siNA sense region
ccaccuugacgguggggcg

SEQ ID NO: 798 - RNA, 19 nt, Artificial Sequence
  Description of Artificial Sequence:  Target sequence/siNA sense region
guagacuugacaacauccc

SEQ ID NO: 799 - RNA, 19 nt, Artificial Sequence
  Description of Artificial Sequence:  Target sequence/siNA sense region
cacaguggcacggagagaa

SEQ ID NO: 800 - RNA, 19 nt, Artificial Sequence
  Description of Artificial Sequence:  Target sequence/siNA sense region
aggcccauaccuucugguu

SEQ ID NO: 801 - RNA, 19 nt, Artificial Sequence
  Description of Artificial Sequence:  Target sequence/siNA sense region
ugcuucagaccugacaccg

SEQ ID NO: 802 - RNA, 19 nt, Artificial Sequence
  Description of Artificial Sequence:  Target sequence/siNA sense region
gucccucagugauacguac

SEQ ID NO: 803 - RNA, 19 nt, Artificial Sequence
  Description of Artificial Sequence:  Target sequence/siNA sense region
cagccaaaaaggaccaacu

SEQ ID NO: 804 - RNA, 19 nt, Artificial Sequence
  Description of Artificial Sequence:  Target sequence/siNA sense region
uggcuucugugcacuagcc

SEQ ID NO: 805 - RNA, 19 nt, Artificial Sequence
  Description of Artificial Sequence:  Target sequence/siNA sense region
cugugauuaacuugcuuag

SEQ ID NO: 806 - RNA, 19 nt, Artificial Sequence
  Description of Artificial Sequence:  Target sequence/siNA sense region
guaugguucucagaucuug

SEQ ID NO: 807 - RNA, 19 nt, Artificial Sequence
  Description of Artificial Sequence:  Target sequence/siNA sense region
gacaguauauuugaaacug

SEQ ID NO: 808 - RNA, 19 nt, Artificial Sequence
  Description of Artificial Sequence:  Target sequence/siNA sense region
guaaauauguuugugccuu

SEQ ID NO: 809 - RNA, 19 nt, Artificial Sequence
  Description of Artificial Sequence:  Target sequence/siNA sense region
uaaaaggagagaagaaagu

SEQ ID NO: 810 - RNA, 19 nt, Artificial Sequence
  Description of Artificial Sequence:  Target sequence/siNA sense region
uguagauaguuaaaagacu

SEQ ID NO: 811 - RNA, 19 nt, Artificial Sequence
  Description of Artificial Sequence:  Target sequence/siNA sense region
ugcagcugcugaaguucug

SEQ ID NO: 812 - RNA, 19 nt, Artificial Sequence
  Description of Artificial Sequence:  Target sequence/siNA sense region
gagccgggcaagucgagag

SEQ ID NO: 813 - RNA, 19 nt, Artificial Sequence
  Description of Artificial Sequence:  Target sequence/siNA sense region
gggcuguuggacagcugcu

SEQ ID NO: 814 - RNA, 19 nt, Artificial Sequence
  Description of Artificial Sequence:  Target sequence/siNA sense region
uugugggcccggaguaauc

SEQ ID NO: 815 - RNA, 19 nt, Artificial Sequence
  Description of Artificial Sequence:  Target sequence/siNA sense region
caggcagccuucauaggcg

SEQ ID NO: 816 - RNA, 19 nt, Artificial Sequence
  Description of Artificial Sequence:  Target sequence/siNA sense region
ggucaugugugcaugugag

SEQ ID NO: 817 - RNA, 19 nt, Artificial Sequence
  Description of Artificial Sequence:  Target sequence/siNA sense region
gcacaugcguauaugugcg

SEQ ID NO: 818 - RNA, 19 nt, Artificial Sequence
  Description of Artificial Sequence:  Target sequence/siNA sense region
gucucucuuucucccucac

SEQ ID NO: 819 - RNA, 19 nt, Artificial Sequence
  Description of Artificial Sequence:  Target sequence/siNA sense region
cccccagguguugccauuu

SEQ ID NO: 820 - RNA, 19 nt, Artificial Sequence
  Description of Artificial Sequence:  Target sequence/siNA sense region
ucucugcuuacccuucacc

SEQ ID NO: 821 - RNA, 19 nt, Artificial Sequence
  Description of Artificial Sequence:  Target sequence/siNA sense region
cuuuggugcagagguuucu

SEQ ID NO: 822 - RNA, 19 nt, Artificial Sequence
  Description of Artificial Sequence:  Target sequence/siNA sense region
uugaauaucugccccagua

SEQ ID NO: 823 - RNA, 19 nt, Artificial Sequence
  Description of Artificial Sequence:  Target sequence/siNA sense region
agucagaagcagguucuug

SEQ ID NO: 824 - RNA, 19 nt, Artificial Sequence
  Description of Artificial Sequence:  Target sequence/siNA sense region
gaugucauguacuuccugu

SEQ ID NO: 825 - RNA, 19 nt, Artificial Sequence
  Description of Artificial Sequence:  Target sequence/siNA sense region
uguacucuuuauuucuagc

SEQ ID NO: 826 - RNA, 19 nt, Artificial Sequence
  Description of Artificial Sequence:  Target sequence/siNA sense region
cagagugaggauguguuuu

SEQ ID NO: 827 - RNA, 19 nt, Artificial Sequence
  Description of Artificial Sequence:  Target sequence/siNA sense region
ugcacgucuugcuauuuga

SEQ ID NO: 828 - RNA, 19 nt, Artificial Sequence
  Description of Artificial Sequence:  Target sequence/siNA sense region
agcaugcacagcugcuugu

SEQ ID NO: 829 - RNA, 19 nt, Artificial Sequence
  Description of Artificial Sequence:  Target sequence/siNA sense region
uccugcucucuucaggagg

SEQ ID NO: 830 - RNA, 19 nt, Artificial Sequence
  Description of Artificial Sequence:  Target sequence/siNA sense region
gcccuggugucaggcaggu

SEQ ID NO: 831 - RNA, 19 nt, Artificial Sequence
  Description of Artificial Sequence:  Target sequence/siNA sense region
uuugccagugaagacuucu

SEQ ID NO: 832 - RNA, 19 nt, Artificial Sequence
  Description of Artificial Sequence:  Target sequence/siNA sense region
uuggguaguuuagauccca

SEQ ID NO: 833 - RNA, 19 nt, Artificial Sequence
  Description of Artificial Sequence:  Target sequence/siNA sense region
augucaccucagcugauau

SEQ ID NO: 834 - RNA, 19 nt, Artificial Sequence
  Description of Artificial Sequence:  Target sequence/siNA sense region
uuauggcaagugauaucac

SEQ ID NO: 835 - RNA, 19 nt, Artificial Sequence
  Description of Artificial Sequence:  Target sequence/siNA sense region
ccucucuucagccccuagu

SEQ ID NO: 836 - RNA, 19 nt, Artificial Sequence
  Description of Artificial Sequence:  Target sequence/siNA sense region
ugcuauucuguguugaaca

SEQ ID NO: 837 - RNA, 19 nt, Artificial Sequence
  Description of Artificial Sequence:  Target sequence/siNA sense region
acaauugauacuucaggug

SEQ ID NO: 838 - RNA, 19 nt, Artificial Sequence
  Description of Artificial Sequence:  Target sequence/siNA sense region
gcuuuugaugugaaaauca

SEQ ID NO: 839 - RNA, 19 nt, Artificial Sequence
  Description of Artificial Sequence:  Target sequence/siNA sense region
augaaaagaggaacaggug

SEQ ID NO: 840 - RNA, 19 nt, Artificial Sequence
  Description of Artificial Sequence:  Target sequence/siNA sense region
ggauguauagcauuuuuau

SEQ ID NO: 841 - RNA, 19 nt, Artificial Sequence
  Description of Artificial Sequence:  Target sequence/siNA sense region
uucaugccaucuguuuuca

SEQ ID NO: 842 - RNA, 19 nt, Artificial Sequence
  Description of Artificial Sequence:  Target sequence/siNA sense region
aaccaacuauuuuugagga

SEQ ID NO: 843 - RNA, 19 nt, Artificial Sequence
  Description of Artificial Sequence:  Target sequence/siNA sense region
aauuaucaugggaaaagac

SEQ ID NO: 844 - RNA, 19 nt, Artificial Sequence
  Description of Artificial Sequence:  Target sequence/siNA sense region
ccagggcuuuucccaggaa

SEQ ID NO: 845 - RNA, 19 nt, Artificial Sequence
  Description of Artificial Sequence:  Target sequence/siNA sense region
auaucccaaacuucggaaa

SEQ ID NO: 846 - RNA, 19 nt, Artificial Sequence
  Description of Artificial Sequence:  Target sequence/siNA sense region
acaaguuauucucuucacu

SEQ ID NO: 847 - RNA, 19 nt, Artificial Sequence
  Description of Artificial Sequence:  Target sequence/siNA sense region
ucccaauaacuaaugcuaa

SEQ ID NO: 848 - RNA, 19 nt, Artificial Sequence
  Description of Artificial Sequence:  Target sequence/siNA sense region
agaaaugcugaaaaucaaa

SEQ ID NO: 849 - RNA, 19 nt, Artificial Sequence
  Description of Artificial Sequence:  Target sequence/siNA sense region
aguaaaaaauuaaagccca

SEQ ID NO: 850 - RNA, 19 nt, Artificial Sequence
  Description of Artificial Sequence:  Target sequence/siNA sense region
auaaggccagaaacuccuu

SEQ ID NO: 851 - RNA, 19 nt, Artificial Sequence
  Description of Artificial Sequence:  Target sequence/siNA sense region
uuugcugucuuucucuaaa

SEQ ID NO: 852 - RNA, 19 nt, Artificial Sequence
  Description of Artificial Sequence:  Target sequence/siNA sense region
auaugauuacuuuaaaaua

SEQ ID NO: 853 - RNA, 19 nt, Artificial Sequence
  Description of Artificial Sequence:  Target sequence/siNA sense region
aaaaaaguaacaagguguc

SEQ ID NO: 854 - RNA, 19 nt, Artificial Sequence
  Description of Artificial Sequence:  Target sequence/siNA sense region
cuuuuccacuccuauggaa

SEQ ID NO: 855 - RNA, 19 nt, Artificial Sequence
  Description of Artificial Sequence:  Target sequence/siNA sense region
aaagggucuucuuggcagc

SEQ ID NO: 856 - RNA, 19 nt, Artificial Sequence
  Description of Artificial Sequence:  Target sequence/siNA sense region
cuuaacauugacuucuugg

SEQ ID NO: 857 - RNA, 19 nt, Artificial Sequence
  Description of Artificial Sequence:  Target sequence/siNA sense region
guuuggggagaaauaaauu

SEQ ID NO: 858 - RNA, 19 nt, Artificial Sequence
  Description of Artificial Sequence:  Target sequence/siNA sense region
uuuguuucagaauuuugua

SEQ ID NO: 859 - RNA, 19 nt, Artificial Sequence
  Description of Artificial Sequence:  Target sequence/siNA sense region
auauuguaggaaucccuuu

SEQ ID NO: 860 - RNA, 19 nt, Artificial Sequence
  Description of Artificial Sequence:  Target sequence/siNA sense region
ugagaaugugauuccuuuu

SEQ ID NO: 861 - RNA, 19 nt, Artificial Sequence
  Description of Artificial Sequence:  Target sequence/siNA sense region
ugauggggagaaagggcaa

SEQ ID NO: 862 - RNA, 19 nt, Artificial Sequence
  Description of Artificial Sequence:  Target sequence/siNA sense region
aauuauuuuaauauuuugu

SEQ ID NO: 863 - RNA, 19 nt, Artificial Sequence
  Description of Artificial Sequence:  Target sequence/siNA sense region
uauuuucaacuuuauaaag

SEQ ID NO: 864 - RNA, 19 nt, Artificial Sequence
  Description of Artificial Sequence:  Target sequence/siNA sense region
gauaaaauauccucagggg

SEQ ID NO: 865 - RNA, 19 nt, Artificial Sequence
  Description of Artificial Sequence:  Target sequence/siNA sense region
guggagaagugucguuuuc

SEQ ID NO: 866 - RNA, 19 nt, Artificial Sequence
  Description of Artificial Sequence:  Target sequence/siNA sense region
cauaacuugcugaauuuca

SEQ ID NO: 867 - RNA, 19 nt, Artificial Sequence
  Description of Artificial Sequence:  Target sequence/siNA sense region
aggcauuuuguucuacaug

SEQ ID NO: 868 - RNA, 19 nt, Artificial Sequence
  Description of Artificial Sequence:  Target sequence/siNA sense region
gaggacucauauauuuaag

SEQ ID NO: 869 - RNA, 19 nt, Artificial Sequence
  Description of Artificial Sequence:  Target sequence/siNA sense region
gccuuuuguguaauaagaa

SEQ ID NO: 870 - RNA, 19 nt, Artificial Sequence
  Description of Artificial Sequence:  Target sequence/siNA sense region
aaguauaaagucacuucca

SEQ ID NO: 871 - RNA, 19 nt, Artificial Sequence
  Description of Artificial Sequence:  Target sequence/siNA sense region
aguguuggcugugugacag

SEQ ID NO: 872 - RNA, 19 nt, Artificial Sequence
  Description of Artificial Sequence:  Target sequence/siNA sense region
gaaucuuguauuugggcca

SEQ ID NO: 873 - RNA, 19 nt, Artificial Sequence
  Description of Artificial Sequence:  Target sequence/siNA sense region
aagguguuuccauuucuca

SEQ ID NO: 874 - RNA, 19 nt, Artificial Sequence
  Description of Artificial Sequence:  Target sequence/siNA sense region
aaucagugcagugauacau

SEQ ID NO: 875 - RNA, 19 nt, Artificial Sequence
  Description of Artificial Sequence:  Target sequence/siNA sense region
uguacuccagagggacagg

SEQ ID NO: 876 - RNA, 19 nt, Artificial Sequence
  Description of Artificial Sequence:  Target sequence/siNA sense region
gguggacccccugagucaa

SEQ ID NO: 877 - RNA, 19 nt, Artificial Sequence
  Description of Artificial Sequence:  Target sequence/siNA sense region
acuggagcaagaaggaagg

SEQ ID NO: 878 - RNA, 19 nt, Artificial Sequence
  Description of Artificial Sequence:  Target sequence/siNA sense region
gaggcagacugauggcgau

SEQ ID NO: 879 - RNA, 19 nt, Artificial Sequence
  Description of Artificial Sequence:  Target sequence/siNA sense region
uucccucucacccgggacu

SEQ ID NO: 880 - RNA, 19 nt, Artificial Sequence
  Description of Artificial Sequence:  Target sequence/siNA sense region
ucucccccuuucaaggaaa

SEQ ID NO: 881 - RNA, 19 nt, Artificial Sequence
  Description of Artificial Sequence:  Target sequence/siNA sense region
agugaaccuuuaaaguaaa

SEQ ID NO: 882 - RNA, 19 nt, Artificial Sequence
  Description of Artificial Sequence:  Target sequence/siNA sense region
aggccucaucuccuuuauu

SEQ ID NO: 883 - RNA, 19 nt, Artificial Sequence
  Description of Artificial Sequence:  Target sequence/siNA sense region
ugcaguucaaauccucacc

SEQ ID NO: 884 - RNA, 19 nt, Artificial Sequence
  Description of Artificial Sequence:  Target sequence/siNA sense region
cauccacagcaagaugaau

SEQ ID NO: 885 - RNA, 19 nt, Artificial Sequence
  Description of Artificial Sequence:  Target sequence/siNA sense region
uuuuaucagccauguuugg

SEQ ID NO: 886 - RNA, 19 nt, Artificial Sequence
  Description of Artificial Sequence:  Target sequence/siNA sense region
guuguaaaugcucguguga

SEQ ID NO: 887 - RNA, 19 nt, Artificial Sequence
  Description of Artificial Sequence:  Target sequence/siNA sense region
auuuccuacagaaauacug

SEQ ID NO: 888 - RNA, 19 nt, Artificial Sequence
  Description of Artificial Sequence:  Target sequence/siNA sense region
gcucugaauauuuuguaau

SEQ ID NO: 889 - RNA, 19 nt, Artificial Sequence
  Description of Artificial Sequence:  Target sequence/siNA sense region
uaaaggucuuugcacaugu

SEQ ID NO: 890 - RNA, 19 nt, Artificial Sequence
  Description of Artificial Sequence:  Target sequence/siNA sense region
ugaccacauacguguuagg

SEQ ID NO: 891 - RNA, 19 nt, Artificial Sequence
  Description of Artificial Sequence:  Target sequence/siNA sense region
gaggcugcaugcucuggaa

SEQ ID NO: 892 - RNA, 19 nt, Artificial Sequence
  Description of Artificial Sequence:  Target sequence/siNA sense region
agccuggacucuaagcugg

SEQ ID NO: 893 - RNA, 19 nt, Artificial Sequence
  Description of Artificial Sequence:  Target sequence/siNA sense region
gagcucuuggaagagcucu

SEQ ID NO: 894 - RNA, 19 nt, Artificial Sequence
  Description of Artificial Sequence:  Target sequence/siNA sense region
uucgguuucugagcauaau

SEQ ID NO: 895 - RNA, 19 nt, Artificial Sequence
  Description of Artificial Sequence:  Target sequence/siNA sense region
ugcucccaucuccugauuu

SEQ ID NO: 896 - RNA, 19 nt, Artificial Sequence
  Description of Artificial Sequence:  Target sequence/siNA sense region
ucucugaacagaaaacaaa

SEQ ID NO: 897 - RNA, 19 nt, Artificial Sequence
  Description of Artificial Sequence:  Target sequence/siNA sense region
aagagagaaugagggaaau

SEQ ID NO: 898 - RNA, 19 nt, Artificial Sequence
  Description of Artificial Sequence:  Target sequence/siNA sense region
uugcuauuuuauuuguauu

SEQ ID NO: 899 - RNA, 19 nt, Artificial Sequence
  Description of Artificial Sequence:  Target sequence/siNA sense region
ucaugaacuuggcuguaau

SEQ ID NO: 900 - RNA, 19 nt, Artificial Sequence
  Description of Artificial Sequence:  Target sequence/siNA sense region
ucaguuaugccguauagga

SEQ ID NO: 901 - RNA, 19 nt, Artificial Sequence
  Description of Artificial Sequence:  Target sequence/siNA sense region
augucagacaauaccacug

SEQ ID NO: 902 - RNA, 19 nt, Artificial Sequence
  Description of Artificial Sequence:  Target sequence/siNA sense region
gguuaaaauaaagccuauu

SEQ ID NO: 903 - RNA, 19 nt, Artificial Sequence
  Description of Artificial Sequence:  Target sequence/siNA sense region
uaaagccuauuuuucaaau

SEQ ID NO: 904 - RNA, 19 nt, Artificial Sequence
  Description of Artificial Sequence:  siNA antisense region
ggcuccaguggucgcgguu

SEQ ID NO: 905 - RNA, 19 nt, Artificial Sequence
  Description of Artificial Sequence:  siNA antisense region
agcugcugcgcccgcuaag

SEQ ID NO: 906 - RNA, 19 nt, Artificial Sequence
  Description of Artificial Sequence:  siNA antisense region
ucgcaguacucccguucca

SEQ ID NO: 907 - RNA, 19 nt, Artificial Sequence
  Description of Artificial Sequence:  siNA antisense region
ggccgacuccgggcugcgu

SEQ ID NO: 908 - RNA, 19 nt, Artificial Sequence
  Description of Artificial Sequence:  siNA antisense region
gcaccuucgccccuacaag

SEQ ID NO: 909 - RNA, 19 nt, Artificial Sequence
  Description of Artificial Sequence:  siNA antisense region
gcccgccgcgaucucccug

SEQ ID NO: 910 - RNA, 19 nt, Artificial Sequence
  Description of Artificial Sequence:  siNA antisense region
uccggcgcucaagacugcg

SEQ ID NO: 911 - RNA, 19 nt, Artificial Sequence
  Description of Artificial Sequence:  siNA antisense region
cuaagggcagggacgcgcu

SEQ ID NO: 912 - RNA, 19 nt, Artificial Sequence
  Description of Artificial Sequence:  siNA antisense region
cgacuggggcaagccccgc

SEQ ID NO: 913 - RNA, 19 nt, Artificial Sequence
  Description of Artificial Sequence:  siNA antisense region
cggcuggaugugccccugc

SEQ ID NO: 914 - RNA, 19 nt, Artificial Sequence
  Description of Artificial Sequence:  siNA antisense region
ggcugcugucagccgcagc

SEQ ID NO: 915 - RNA, 19 nt, Artificial Sequence
  Description of Artificial Sequence:  siNA antisense region
gcagacucccgcgcgcgcg

SEQ ID NO: 916 - RNA, 19 nt, Artificial Sequence
  Description of Artificial Sequence:  siNA antisense region
ugcggcugccgcgaccccg

SEQ ID NO: 917 - RNA, 19 nt, Artificial Sequence
  Description of Artificial Sequence:  siNA antisense region
gcuggucgcccgcgcaggu

SEQ ID NO: 918 - RNA, 19 nt, Artificial Sequence
  Description of Artificial Sequence:  siNA antisense region
gccgggcggggaccuugcg

SEQ ID NO: 919 - RNA, 19 nt, Artificial Sequence
  Description of Artificial Sequence:  siNA antisense region
gcccuugcugcccgcccag

SEQ ID NO: 920 - RNA, 19 nt, Artificial Sequence
  Description of Artificial Sequence:  siNA antisense region
acccgcacccucuccccgg

SEQ ID NO: 921 - RNA, 19 nt, Artificial Sequence
  Description of Artificial Sequence:  siNA antisense region
uguggggcccccgccugca

SEQ ID NO: 922 - RNA, 19 nt, Artificial Sequence
  Description of Artificial Sequence:  siNA antisense region
cgggcaagaagguggcccu

SEQ ID NO: 923 - RNA, 19 nt, Artificial Sequence
  Description of Artificial Sequence:  siNA antisense region
uuuuccagcggcagccgcc

SEQ ID NO: 924 - RNA, 19 nt, Artificial Sequence
  Description of Artificial Sequence:  siNA antisense region
ugggccucuccugagacau

SEQ ID NO: 925 - RNA, 19 nt, Artificial Sequence
  Description of Artificial Sequence:  siNA antisense region
gcuccugccgguagaacgu

SEQ ID NO: 926 - RNA, 19 nt, Artificial Sequence
  Description of Artificial Sequence:  siNA antisense region
cccagauugucuuguucag

SEQ ID NO: 927 - RNA, 19 nt, Artificial Sequence
  Description of Artificial Sequence:  siNA antisense region
gguaacgcucgggcaccuc

SEQ ID NO: 928 - RNA, 19 nt, Artificial Sequence
  Description of Artificial Sequence:  siNA antisense region
ccacuggagacagguucug

SEQ ID NO: 929 - RNA, 19 nt, Artificial Sequence
  Description of Artificial Sequence:  siNA antisense region
agccauaggcgccagagcc

SEQ ID NO: 930 - RNA, 19 nt, Artificial Sequence
  Description of Artificial Sequence:  siNA antisense region
caaaagcagcacacacaga

SEQ ID NO: 931 - RNA, 19 nt, Artificial Sequence
  Description of Artificial Sequence:  siNA antisense region
guaaccccguuuuuguguc

SEQ ID NO: 932 - RNA, 19 nt, Artificial Sequence
  Description of Artificial Sequence:  siNA antisense region
gcuucuucacugccacacg

SEQ ID NO: 933 - RNA, 19 nt, Artificial Sequence
  Description of Artificial Sequence:  siNA antisense region
acugaaauggucuggagag

SEQ ID NO: 934 - RNA, 19 nt, Artificial Sequence
  Description of Artificial Sequence:  siNA antisense region
uuuucgcaugaaugaugga

SEQ ID NO: 935 - RNA, 19 nt, Artificial Sequence
  Description of Artificial Sequence:  siNA antisense region
gcaguucucuguagguucu

SEQ ID NO: 936 - RNA, 19 nt, Artificial Sequence
  Description of Artificial Sequence:  siNA antisense region
ucauauguuuaaguaaccg

SEQ ID NO: 937 - RNA, 19 nt, Artificial Sequence
  Description of Artificial Sequence:  siNA antisense region
caaucacauuuucauguuu

SEQ ID NO: 938 - RNA, 19 nt, Artificial Sequence
  Description of Artificial Sequence:  siNA antisense region
uaaaaacguccaacagacc

SEQ ID NO: 939 - RNA, 19 nt, Artificial Sequence
  Description of Artificial Sequence:  siNA antisense region
ccagagaccuugcaggugu

SEQ ID NO: 940 - RNA, 19 nt, Artificial Sequence
  Description of Artificial Sequence:  siNA antisense region
acacaucauugaauuccuc

SEQ ID NO: 941 - RNA, 19 nt, Artificial Sequence
  Description of Artificial Sequence:  siNA antisense region
ugagaugggucaccagaua

SEQ ID NO: 942 - RNA, 19 nt, Artificial Sequence
  Description of Artificial Sequence:  siNA antisense region
uguucagaucugcccccau

SEQ ID NO: 943 - RNA, 19 nt, Artificial Sequence
  Description of Artificial Sequence:  siNA antisense region
ucugacauuucacaauguu

SEQ ID NO: 944 - RNA, 19 nt, Artificial Sequence
  Description of Artificial Sequence:  siNA antisense region
cauggucaucuguaagcuu

SEQ ID NO: 945 - RNA, 19 nt, Artificial Sequence
  Description of Artificial Sequence:  siNA antisense region
gguagauaaggaacugaac

SEQ ID NO: 946 - RNA, 19 nt, Artificial Sequence
  Description of Artificial Sequence:  siNA antisense region
uuagaccucggagaauuug

SEQ ID NO: 947 - RNA, 19 nt, Artificial Sequence
  Description of Artificial Sequence:  siNA antisense region
cagcugaauguauauacuu

SEQ ID NO: 948 - RNA, 19 nt, Artificial Sequence
  Description of Artificial Sequence:  siNA antisense region
ggucccugugaauuauguc

SEQ ID NO: 949 - RNA, 19 nt, Artificial Sequence
  Description of Artificial Sequence:  siNA antisense region
cuagauuacuagguuuuag

SEQ ID NO: 950 - RNA, 19 nt, Artificial Sequence
  Description of Artificial Sequence:  siNA antisense region
cacagucuucauucacagc

SEQ ID NO: 951 - RNA, 19 nt, Artificial Sequence
  Description of Artificial Sequence:  siNA antisense region
aauccagaaucuucagcuc

SEQ ID NO: 952 - RNA, 19 nt, Artificial Sequence
  Description of Artificial Sequence:  siNA antisense region
ugugccgagccaguccaaa

SEQ ID NO: 953 - RNA, 19 nt, Artificial Sequence
  Description of Artificial Sequence:  siNA antisense region
cugucauuucaucaucugu

SEQ ID NO: 954 - RNA, 19 nt, Artificial Sequence
  Description of Artificial Sequence:  siNA antisense region
accuaguggccacguagcc

SEQ ID NO: 955 - RNA, 19 nt, Artificial Sequence
  Description of Artificial Sequence:  siNA antisense region
ucucaggagcccuguacca

SEQ ID NO: 956 - RNA, 19 nt, Artificial Sequence
  Description of Artificial Sequence:  siNA antisense region
gcauccaguucagcaugau

SEQ ID NO: 957 - RNA, 19 nt, Artificial Sequence
  Description of Artificial Sequence:  siNA antisense region
caacugucugguuguaaug

SEQ ID NO: 958 - RNA, 19 nt, Artificial Sequence
  Description of Artificial Sequence:  siNA antisense region
aucccacugaccaaauauc

SEQ ID NO: 959 - RNA, 19 nt, Artificial Sequence
  Description of Artificial Sequence:  siNA antisense region
acagcucggccauuaugca

SEQ ID NO: 960 - RNA, 19 nt, Artificial Sequence
  Description of Artificial Sequence:  siNA antisense region
acaauguucuuccagucaa

SEQ ID NO: 961 - RNA, 19 nt, Artificial Sequence
  Description of Artificial Sequence:  siNA antisense region
uauggucuguaccaggaaa

SEQ ID NO: 962 - RNA, 19 nt, Artificial Sequence
  Description of Artificial Sequence:  siNA antisense region
ugagcuucaacugaucaau

SEQ ID NO: 963 - RNA, 19 nt, Artificial Sequence
  Description of Artificial Sequence:  siNA antisense region
uuccaacgagucuuaaaau

SEQ ID NO: 964 - RNA, 19 nt, Artificial Sequence
  Description of Artificial Sequence:  siNA antisense region
aaagcucagccccuggggu

SEQ ID NO: 965 - RNA, 19 nt, Artificial Sequence
  Description of Artificial Sequence:  siNA antisense region
cugaggagauuuucuucaa

SEQ ID NO: 966 - RNA, 19 nt, Artificial Sequence
  Description of Artificial Sequence:  siNA antisense region
uauaguuucuugcagacuc

SEQ ID NO: 967 - RNA, 19 nt, Artificial Sequence
  Description of Artificial Sequence:  siNA antisense region
ucugagucaaagacugaau

SEQ ID NO: 968 - RNA, 19 nt, Artificial Sequence
  Description of Artificial Sequence:  siNA antisense region
caaaguucaucuucggcau

SEQ ID NO: 969 - RNA, 19 nt, Artificial Sequence
  Description of Artificial Sequence:  siNA antisense region
caccaauaaauacauucgc

SEQ ID NO: 970 - RNA, 19 nt, Artificial Sequence
  Description of Artificial Sequence:  siNA antisense region
cgacagccaggggauuggc

SEQ ID NO: 971 - RNA, 19 nt, Artificial Sequence
  Description of Artificial Sequence:  siNA antisense region
gcaucuucuccagcaaguc

SEQ ID NO: 972 - RNA, 19 nt, Artificial Sequence
  Description of Artificial Sequence:  siNA antisense region
uaucugaguccaauacaag

SEQ ID NO: 973 - RNA, 19 nt, Artificial Sequence
  Description of Artificial Sequence:  siNA antisense region
gggccgcuguaauucucuu

SEQ ID NO: 974 - RNA, 19 nt, Artificial Sequence
  Description of Artificial Sequence:  siNA antisense region
aggcaugugcaagggcuug

SEQ ID NO: 975 - RNA, 19 nt, Artificial Sequence
  Description of Artificial Sequence:  siNA antisense region
cgugguacugagcaaagua

SEQ ID NO: 976 - RNA, 19 nt, Artificial Sequence
  Description of Artificial Sequence:  siNA antisense region
cugguucaucaucaggauc

SEQ ID NO: 977 - RNA, 19 nt, Artificial Sequence
  Description of Artificial Sequence:  siNA antisense region
gaucauaaggaucggccac

SEQ ID NO: 978 - RNA, 19 nt, Artificial Sequence
  Description of Artificial Sequence:  siNA antisense region
cccugcuuucaaaggacug

SEQ ID NO: 979 - RNA, 19 nt, Artificial Sequence
  Description of Artificial Sequence:  siNA antisense region
acucaucuauaaggagguc

SEQ ID NO: 980 - RNA, 19 nt, Artificial Sequence
  Description of Artificial Sequence:  siNA antisense region
cauaggucaggcuuuucca

SEQ ID NO: 981 - RNA, 19 nt, Artificial Sequence
  Description of Artificial Sequence:  siNA antisense region
caaagcugaugacuucauc

SEQ ID NO: 982 - RNA, 19 nt, Artificial Sequence
  Description of Artificial Sequence:  siNA antisense region
ggucaaggggugguggcac

SEQ ID NO: 983 - RNA, 19 nt, Artificial Sequence
  Description of Artificial Sequence:  siNA antisense region
aggacuccaucucuucuug

SEQ ID NO: 984 - RNA, 19 nt, Artificial Sequence
  Description of Artificial Sequence:  siNA antisense region
aacagaaaccaggugcuca

SEQ ID NO: 985 - RNA, 19 nt, Artificial Sequence
  Description of Artificial Sequence:  siNA antisense region
gugaagugggaucaacaga

SEQ ID NO: 986 - RNA, 19 nt, Artificial Sequence
  Description of Artificial Sequence:  siNA antisense region
aaaggccuuccccucacag

SEQ ID NO: 987 - RNA, 19 nt, Artificial Sequence
  Description of Artificial Sequence:  siNA antisense region
uuuggagaguucccgugaa

SEQ ID NO: 988 - RNA, 19 nt, Artificial Sequence
  Description of Artificial Sequence:  siNA antisense region
agaggcacuugaauaauau

SEQ ID NO: 989 - RNA, 19 nt, Artificial Sequence
  Description of Artificial Sequence:  siNA antisense region
gaggaaaucucugcaacaa

SEQ ID NO: 990 - RNA, 19 nt, Artificial Sequence
  Description of Artificial Sequence:  siNA antisense region
acacccccuuccaccaugg

SEQ ID NO: 991 - RNA, 19 nt, Artificial Sequence
  Description of Artificial Sequence:  siNA antisense region
acgcacgcacacgcacgca

SEQ ID NO: 992 - RNA, 19 nt, Artificial Sequence
  Description of Artificial Sequence:  siNA antisense region
acaugcacacacacuaaca

SEQ ID NO: 993 - RNA, 19 nt, Artificial Sequence
  Description of Artificial Sequence:  siNA antisense region
ccacaaagacagacacaca

SEQ ID NO: 994 - RNA, 19 nt, Artificial Sequence
  Description of Artificial Sequence:  siNA antisense region
ucauauugucuuacccucc

SEQ ID NO: 995 - RNA, 19 nt, Artificial Sequence
  Description of Artificial Sequence:  siNA antisense region
acugugaucauaguuuguu

SEQ ID NO: 996 - RNA, 19 nt, Artificial Sequence
  Description of Artificial Sequence:  siNA antisense region
acaaccuccuguaaaguca

SEQ ID NO: 997 - RNA, 19 nt, Artificial Sequence
  Description of Artificial Sequence:  siNA antisense region
ggcugcccuggagcaucca

SEQ ID NO: 998 - RNA, 19 nt, Artificial Sequence
  Description of Artificial Sequence:  siNA antisense region
aaagaagagcaagguggag

SEQ ID NO: 999 - RNA, 19 nt, Artificial Sequence
  Description of Artificial Sequence:  siNA antisense region
gccugagccaacucucaga

SEQ ID NO: 1000 - RNA, 19 nt, Artificial Sequence
  Description of Artificial Sequence:  siNA antisense region
ggacagcagcucuugucug

SEQ ID NO: 1001 - RNA, 19 nt, Artificial Sequence
  Description of Artificial Sequence:  siNA antisense region
uugaacauauuccuaaaag

SEQ ID NO: 1002 - RNA, 19 nt, Artificial Sequence
  Description of Artificial Sequence:  siNA antisense region
auauuuuuuuacuuugcau

SEQ ID NO: 1003 - RNA, 19 nt, Artificial Sequence
  Description of Artificial Sequence:  siNA antisense region
cgggauuggggacaauuca

SEQ ID NO: 1004 - RNA, 19 nt, Artificial Sequence
  Description of Artificial Sequence:  siNA antisense region
aaguggcaaaagcaugacc

SEQ ID NO: 1005 - RNA, 19 nt, Artificial Sequence
  Description of Artificial Sequence:  siNA antisense region
gggucacaggagaagccaa

SEQ ID NO: 1006 - RNA, 19 nt, Artificial Sequence
  Description of Artificial Sequence:  siNA antisense region
cgccccaccgucaaggugg

SEQ ID NO: 1007 - RNA, 19 nt, Artificial Sequence
  Description of Artificial Sequence:  siNA antisense region
gggauguugucaagucuac

SEQ ID NO: 1008 - RNA, 19 nt, Artificial Sequence
  Description of Artificial Sequence:  siNA antisense region
uucucuccgugccacugug

SEQ ID NO: 1009 - RNA, 19 nt, Artificial Sequence
  Description of Artificial Sequence:  siNA antisense region
aaccagaagguaugggccu

SEQ ID NO: 1010 - RNA, 19 nt, Artificial Sequence
  Description of Artificial Sequence:  siNA antisense region
cggugucaggucugaagca

SEQ ID NO: 1011 - RNA, 19 nt, Artificial Sequence
  Description of Artificial Sequence:  siNA antisense region
guacguaucacugagggac

SEQ ID NO: 1012 - RNA, 19 nt, Artificial Sequence
  Description of Artificial Sequence:  siNA antisense region
aguugguccuuuuuggcug

SEQ ID NO: 1013 - RNA, 19 nt, Artificial Sequence
  Description of Artificial Sequence:  siNA antisense region
ggcuagugcacagaagcca

SEQ ID NO: 1014 - RNA, 19 nt, Artificial Sequence
  Description of Artificial Sequence:  siNA antisense region
cuaagcaaguuaaucacag

SEQ ID NO: 1015 - RNA, 19 nt, Artificial Sequence
  Description of Artificial Sequence:  siNA antisense region
caagaucugagaaccauac

SEQ ID NO: 1016 - RNA, 19 nt, Artificial Sequence
  Description of Artificial Sequence:  siNA antisense region
caguuucaaauauacuguc

SEQ ID NO: 1017 - RNA, 19 nt, Artificial Sequence
  Description of Artificial Sequence:  siNA antisense region
aaggcacaaacauauuuac

SEQ ID NO: 1018 - RNA, 19 nt, Artificial Sequence
  Description of Artificial Sequence:  siNA antisense region
acuuucuucucuccuuuua

SEQ ID NO: 1019 - RNA, 19 nt, Artificial Sequence
  Description of Artificial Sequence:  siNA antisense region
agucuuuuaacuaucuaca

SEQ ID NO: 1020 - RNA, 19 nt, Artificial Sequence
  Description of Artificial Sequence:  siNA antisense region
cagaacuucagcagcugca

SEQ ID NO: 1021 - RNA, 19 nt, Artificial Sequence
  Description of Artificial Sequence:  siNA antisense region
cucucgacuugcccggcuc

SEQ ID NO: 1022 - RNA, 19 nt, Artificial Sequence
  Description of Artificial Sequence:  siNA antisense region
agcagcuguccaacagccc

SEQ ID NO: 1023 - RNA, 19 nt, Artificial Sequence
  Description of Artificial Sequence:  siNA antisense region
gauuacuccgggcccacaa

SEQ ID NO: 1024 - RNA, 19 nt, Artificial Sequence
  Description of Artificial Sequence:  siNA antisense region
cgccuaugaaggcugccug

SEQ ID NO: 1025 - RNA, 19 nt, Artificial Sequence
  Description of Artificial Sequence:  siNA antisense region
cucacaugcacacaugacc

SEQ ID NO: 1026 - RNA, 19 nt, Artificial Sequence
  Description of Artificial Sequence:  siNA antisense region
cgcacauauacgcaugugc

SEQ ID NO: 1027 - RNA, 19 nt, Artificial Sequence
  Description of Artificial Sequence:  siNA antisense region
gugagggagaaagagagac

SEQ ID NO: 1028 - RNA, 19 nt, Artificial Sequence
  Description of Artificial Sequence:  siNA antisense region
aaauggcaacaccuggggg

SEQ ID NO: 1029 - RNA, 19 nt, Artificial Sequence
  Description of Artificial Sequence:  siNA antisense region
ggugaaggguaagcagaga

SEQ ID NO: 1030 - RNA, 19 nt, Artificial Sequence
  Description of Artificial Sequence:  siNA antisense region
agaaaccucugcaccaaag

SEQ ID NO: 1031 - RNA, 19 nt, Artificial Sequence
  Description of Artificial Sequence:  siNA antisense region
uacuggggcagauauucaa

SEQ ID NO: 1032 - RNA, 19 nt, Artificial Sequence
  Description of Artificial Sequence:  siNA antisense region
caagaaccugcuucugacu

SEQ ID NO: 1033 - RNA, 19 nt, Artificial Sequence
  Description of Artificial Sequence:  siNA antisense region
acaggaaguacaugacauc

SEQ ID NO: 1034 - RNA, 19 nt, Artificial Sequence
  Description of Artificial Sequence:  siNA antisense region
gcuagaaauaaagaguaca

SEQ ID NO: 1035 - RNA, 19 nt, Artificial Sequence
  Description of Artificial Sequence:  siNA antisense region
aaaacacauccucacucug

SEQ ID NO: 1036 - RNA, 19 nt, Artificial Sequence
  Description of Artificial Sequence:  siNA antisense region
ucaaauagcaagacgugca

SEQ ID NO: 1037 - RNA, 19 nt, Artificial Sequence
  Description of Artificial Sequence:  siNA antisense region
acaagcagcugugcaugcu

SEQ ID NO: 1038 - RNA, 19 nt, Artificial Sequence
  Description of Artificial Sequence:  siNA antisense region
ccuccugaagagagcagga

SEQ ID NO: 1039 - RNA, 19 nt, Artificial Sequence
  Description of Artificial Sequence:  siNA antisense region
accugccugacaccagggc

SEQ ID NO: 1040 - RNA, 19 nt, Artificial Sequence
  Description of Artificial Sequence:  siNA antisense region
agaagucuucacuggcaaa

SEQ ID NO: 1041 - RNA, 19 nt, Artificial Sequence
  Description of Artificial Sequence:  siNA antisense region
ugggaucuaaacuacccaa

SEQ ID NO: 1042 - RNA, 19 nt, Artificial Sequence
  Description of Artificial Sequence:  siNA antisense region
auaucagcugaggugacau

SEQ ID NO: 1043 - RNA, 19 nt, Artificial Sequence
  Description of Artificial Sequence:  siNA antisense region
gugauaucacuugccauaa

SEQ ID NO: 1044 - RNA, 19 nt, Artificial Sequence
  Description of Artificial Sequence:  siNA antisense region
acuaggggcugaagagagg

SEQ ID NO: 1045 - RNA, 19 nt, Artificial Sequence
  Description of Artificial Sequence:  siNA antisense region
uguucaacacagaauagca

SEQ ID NO: 1046 - RNA, 19 nt, Artificial Sequence
  Description of Artificial Sequence:  siNA antisense region
caccugaaguaucaauugu

SEQ ID NO: 1047 - RNA, 19 nt, Artificial Sequence
  Description of Artificial Sequence:  siNA antisense region
ugauuuucacaucaaaagc

SEQ ID NO: 1048 - RNA, 19 nt, Artificial Sequence
  Description of Artificial Sequence:  siNA antisense region
caccuguuccucuuuucau

SEQ ID NO: 1049 - RNA, 19 nt, Artificial Sequence
  Description of Artificial Sequence:  siNA antisense region
auaaaaaugcuauacaucc

SEQ ID NO: 1050 - RNA, 19 nt, Artificial Sequence
  Description of Artificial Sequence:  siNA antisense region
ugaaaacagauggcaugaa

SEQ ID NO: 1051 - RNA, 19 nt, Artificial Sequence
  Description of Artificial Sequence:  siNA antisense region
uccucaaaaauaguugguu

SEQ ID NO: 1052 - RNA, 19 nt, Artificial Sequence
  Description of Artificial Sequence:  siNA antisense region
gucuuuucccaugauaauu

SEQ ID NO: 1053 - RNA, 19 nt, Artificial Sequence
  Description of Artificial Sequence:  siNA antisense region
uuccugggaaaagcccugg

SEQ ID NO: 1054 - RNA, 19 nt, Artificial Sequence
  Description of Artificial Sequence:  siNA antisense region
uuuccgaaguuugggauau

SEQ ID NO: 1055 - RNA, 19 nt, Artificial Sequence
  Description of Artificial Sequence:  siNA antisense region
agugaagagaauaacuugu

SEQ ID NO: 1056 - RNA, 19 nt, Artificial Sequence
  Description of Artificial Sequence:  siNA antisense region
uuagcauuaguuauuggga

SEQ ID NO: 1057 - RNA, 19 nt, Artificial Sequence
  Description of Artificial Sequence:  siNA antisense region
uuugauuuucagcauuucu

SEQ ID NO: 1058 - RNA, 19 nt, Artificial Sequence
  Description of Artificial Sequence:  siNA antisense region
ugggcuuuaauuuuuuacu

SEQ ID NO: 1059 - RNA, 19 nt, Artificial Sequence
  Description of Artificial Sequence:  siNA antisense region
aaggaguuucuggccuuau

SEQ ID NO: 1060 - RNA, 19 nt, Artificial Sequence
  Description of Artificial Sequence:  siNA antisense region
uuuagagaaagacagcaaa

SEQ ID NO: 1061 - RNA, 19 nt, Artificial Sequence
  Description of Artificial Sequence:  siNA antisense region
uauuuuaaaguaaucauau

SEQ ID NO: 1062 - RNA, 19 nt, Artificial Sequence
  Description of Artificial Sequence:  siNA antisense region
gacaccuuguuacuuuuuu

SEQ ID NO: 1063 - RNA, 19 nt, Artificial Sequence
  Description of Artificial Sequence:  siNA antisense region
uuccauaggaguggaaaag

SEQ ID NO: 1064 - RNA, 19 nt, Artificial Sequence
  Description of Artificial Sequence:  siNA antisense region
gcugccaagaagacccuuu

SEQ ID NO: 1065 - RNA, 19 nt, Artificial Sequence
  Description of Artificial Sequence:  siNA antisense region
ccaagaagucaauguuaag

SEQ ID NO: 1066 - RNA, 19 nt, Artificial Sequence
  Description of Artificial Sequence:  siNA antisense region
aauuuauuucuccccaaac

SEQ ID NO: 1067 - RNA, 19 nt, Artificial Sequence
  Description of Artificial Sequence:  siNA antisense region
uacaaaauucugaaacaaa

SEQ ID NO: 1068 - RNA, 19 nt, Artificial Sequence
  Description of Artificial Sequence:  siNA antisense region
aaagggauuccuacaauau

SEQ ID NO: 1069 - RNA, 19 nt, Artificial Sequence
  Description of Artificial Sequence:  siNA antisense region
aaaaggaaucacauucuca

SEQ ID NO: 1070 - RNA, 19 nt, Artificial Sequence
  Description of Artificial Sequence:  siNA antisense region
uugcccuuucuccccauca

SEQ ID NO: 1071 - RNA, 19 nt, Artificial Sequence
  Description of Artificial Sequence:  siNA antisense region
acaaaauauuaaaauaauu

SEQ ID NO: 1072 - RNA, 19 nt, Artificial Sequence
  Description of Artificial Sequence:  siNA antisense region
cuuuauaaaguugaaaaua

SEQ ID NO: 1073 - RNA, 19 nt, Artificial Sequence
  Description of Artificial Sequence:  siNA antisense region
ccccugaggauauuuuauc

SEQ ID NO: 1074 - RNA, 19 nt, Artificial Sequence
  Description of Artificial Sequence:  siNA antisense region
gaaaacgacacuucuccac

SEQ ID NO: 1075 - RNA, 19 nt, Artificial Sequence
  Description of Artificial Sequence:  siNA antisense region
ugaaauucagcaaguuaug

SEQ ID NO: 1076 - RNA, 19 nt, Artificial Sequence
  Description of Artificial Sequence:  siNA antisense region
cauguagaacaaaaugccu

SEQ ID NO: 1077 - RNA, 19 nt, Artificial Sequence
  Description of Artificial Sequence:  siNA antisense region
cuuaaauauaugaguccuc

SEQ ID NO: 1078 - RNA, 19 nt, Artificial Sequence
  Description of Artificial Sequence:  siNA antisense region
uucuuauuacacaaaaggc

SEQ ID NO: 1079 - RNA, 19 nt, Artificial Sequence
  Description of Artificial Sequence:  siNA antisense region
uggaagugacuuuauacuu

SEQ ID NO: 1080 - RNA, 19 nt, Artificial Sequence
  Description of Artificial Sequence:  siNA antisense region
cugucacacagccaacacu

SEQ ID NO: 1081 - RNA, 19 nt, Artificial Sequence
  Description of Artificial Sequence:  siNA antisense region
uggcccaaauacaagauuc

SEQ ID NO: 1082 - RNA, 19 nt, Artificial Sequence
  Description of Artificial Sequence:  siNA antisense region
ugagaaauggaaacaccuu

SEQ ID NO: 1083 - RNA, 19 nt, Artificial Sequence
  Description of Artificial Sequence:  siNA antisense region
auguaucacugcacugauu

SEQ ID NO: 1084 - RNA, 19 nt, Artificial Sequence
  Description of Artificial Sequence:  siNA antisense region
ccugucccucuggaguaca

SEQ ID NO: 1085 - RNA, 19 nt, Artificial Sequence
  Description of Artificial Sequence:  siNA antisense region
uugacucaggggguccacc

SEQ ID NO: 1086 - RNA, 19 nt, Artificial Sequence
  Description of Artificial Sequence:  siNA antisense region
ccuuccuucuugcuccagu

SEQ ID NO: 1087 - RNA, 19 nt, Artificial Sequence
  Description of Artificial Sequence:  siNA antisense region
aucgccaucagucugccuc

SEQ ID NO: 1088 - RNA, 19 nt, Artificial Sequence
  Description of Artificial Sequence:  siNA antisense region
agucccgggugagagggaa

SEQ ID NO: 1089 - RNA, 19 nt, Artificial Sequence
  Description of Artificial Sequence:  siNA antisense region
uuuccuugaaagggggaga

SEQ ID NO: 1090 - RNA, 19 nt, Artificial Sequence
  Description of Artificial Sequence:  siNA antisense region
uuuacuuuaaagguucacu

SEQ ID NO: 1091 - RNA, 19 nt, Artificial Sequence
  Description of Artificial Sequence:  siNA antisense region
aauaaaggagaugaggccu

SEQ ID NO: 1092 - RNA, 19 nt, Artificial Sequence
  Description of Artificial Sequence:  siNA antisense region
ggugaggauuugaacugca

SEQ ID NO: 1093 - RNA, 19 nt, Artificial Sequence
  Description of Artificial Sequence:  siNA antisense region
auucaucuugcuguggaug

SEQ ID NO: 1094 - RNA, 19 nt, Artificial Sequence
  Description of Artificial Sequence:  siNA antisense region
ccaaacauggcugauaaaa

SEQ ID NO: 1095 - RNA, 19 nt, Artificial Sequence
  Description of Artificial Sequence:  siNA antisense region
ucacacgagcauuuacaac

SEQ ID NO: 1096 - RNA, 19 nt, Artificial Sequence
  Description of Artificial Sequence:  siNA antisense region
caguauuucuguaggaaau

SEQ ID NO: 1097 - RNA, 19 nt, Artificial Sequence
  Description of Artificial Sequence:  siNA antisense region
auuacaaaauauucagagc

SEQ ID NO: 1098 - RNA, 19 nt, Artificial Sequence
  Description of Artificial Sequence:  siNA antisense region
acaugugcaaagaccuuua

SEQ ID NO: 1099 - RNA, 19 nt, Artificial Sequence
  Description of Artificial Sequence:  siNA antisense region
ccuaacacguaugugguca

SEQ ID NO: 1100 - RNA, 19 nt, Artificial Sequence
  Description of Artificial Sequence:  siNA antisense region
uuccagagcaugcagccuc

SEQ ID NO: 1101 - RNA, 19 nt, Artificial Sequence
  Description of Artificial Sequence:  siNA antisense region
ccagcuuagaguccaggcu

SEQ ID NO: 1102 - RNA, 19 nt, Artificial Sequence
  Description of Artificial Sequence:  siNA antisense region
agagcucuuccaagagcuc

SEQ ID NO: 1103 - RNA, 19 nt, Artificial Sequence
  Description of Artificial Sequence:  siNA antisense region
auuaugcucagaaaccgaa

SEQ ID NO: 1104 - RNA, 19 nt, Artificial Sequence
  Description of Artificial Sequence:  siNA antisense region
aaaucaggagaugggagca

SEQ ID NO: 1105 - RNA, 19 nt, Artificial Sequence
  Description of Artificial Sequence:  siNA antisense region
uuuguuuucuguucagaga

SEQ ID NO: 1106 - RNA, 19 nt, Artificial Sequence
  Description of Artificial Sequence:  siNA antisense region
auuucccucauucucucuu

SEQ ID NO: 1107 - RNA, 19 nt, Artificial Sequence
  Description of Artificial Sequence:  siNA antisense region
aauacaaauaaaauagcaa

SEQ ID NO: 1108 - RNA, 19 nt, Artificial Sequence
  Description of Artificial Sequence:  siNA antisense region
auuacagccaaguucauga

SEQ ID NO: 1109 - RNA, 19 nt, Artificial Sequence
  Description of Artificial Sequence:  siNA antisense region
uccuauacggcauaacuga

SEQ ID NO: 1110 - RNA, 19 nt, Artificial Sequence
  Description of Artificial Sequence:  siNA antisense region
cagugguauugucugacau

SEQ ID NO: 1111 - RNA, 19 nt, Artificial Sequence
  Description of Artificial Sequence:  siNA antisense region
aauaggcuuuauuuuaacc

SEQ ID NO: 1112 - RNA, 19 nt, Artificial Sequence
  Description of Artificial Sequence:  siNA antisense region
auuugaaaaauaggcuuua

SEQ ID NO: 1113 - RNA, 23 nt, Artificial Sequence
  Description of Artificial Sequence:  Target sequence/siNA sense region
accagaccuacugccagagaacc

SEQ ID NO: 1114 - RNA, 23 nt, Artificial Sequence
  Description of Artificial Sequence:  Target sequence/siNA sense region
aucacacaggguuccugacagaa

SEQ ID NO: 1115 - RNA, 23 nt, Artificial Sequence
  Description of Artificial Sequence:  Target sequence/siNA sense region
uuggcucuagucacuggcaucuc

SEQ ID NO: 1116 - RNA, 23 nt, Artificial Sequence
  Description of Artificial Sequence:  Target sequence/siNA sense region
acuguggaguugacucgguguuc

SEQ ID NO: 1117 - RNA, 23 nt, Artificial Sequence
  Description of Artificial Sequence:  Target sequence/siNA sense region
ccuucgaacaucagaccuacugc

SEQ ID NO: 1118 - RNA, 23 nt, Artificial Sequence
  Description of Artificial Sequence:  Target sequence/siNA sense region
ugaacuccaagggcuauaccaag

SEQ ID NO: 1119 - RNA, 23 nt, Artificial Sequence
  Description of Artificial Sequence:  Target sequence/siNA sense region
agggcuauaccaaguccaucgac

SEQ ID NO: 1120 - RNA, 23 nt, Artificial Sequence
  Description of Artificial Sequence:  Target sequence/siNA sense region
uucuguguguggugagcagaagu

SEQ ID NO: 1121 - RNA, 23 nt, Artificial Sequence
  Description of Artificial Sequence:  Target sequence/siNA sense region
aacagcuuggaacaccauguccu

SEQ ID NO: 1122 - RNA, 23 nt, Artificial Sequence
  Description of Artificial Sequence:  Target sequence/siNA sense region
uuuucccagcugacucagaacac

SEQ ID NO: 1123 - RNA, 23 nt, Artificial Sequence
  Description of Artificial Sequence:  Target sequence/siNA sense region
caaugucaacagauccgacuuug

SEQ ID NO: 1124 - RNA, 23 nt, Artificial Sequence
  Description of Artificial Sequence:  Target sequence/siNA sense region
cuuuggccucugauacagacagc

SEQ ID NO: 1125 - RNA, 23 nt, Artificial Sequence
  Description of Artificial Sequence:  Target sequence/siNA sense region
gccuacuuugcucaguaccacga

SEQ ID NO: 1126 - RNA, 23 nt, Artificial Sequence
  Description of Artificial Sequence:  Target sequence/siNA sense region
ugucugucuuugugggaggguaa

SEQ ID NO: 1127 - RNA, 23 nt, Artificial Sequence
  Description of Artificial Sequence:  Target sequence/siNA sense region
aaaagggucuucuuggcagcuua

SEQ ID NO: 1128 - RNA, 23 nt, Artificial Sequence
  Description of Artificial Sequence:  Target sequence/siNA sense region
ggacucuaagcuggagcucuugg

SEQ ID NO: 1129 - RNA, 21 nt, Artificial Sequence
  Description of Artificial Sequence:  siNA sense region
  misc_feature (20)..(21): n stands for thymidine
cagaccuacugccagagaann

SEQ ID NO: 1130 - RNA, 21 nt, Artificial Sequence
  misc_feature (20)..(21): n stands for thymidine
  Description of Artificial Sequence:  siNA sense region
cacacaggguuccugacagnn

SEQ ID NO: 1131 - RNA, 21 nt, Artificial Sequence
  Description of Artificial Sequence:  siNA sense region
  misc_feature (20)..(21): n stands for thymidine
ggcucuagucacuggcaucnn

SEQ ID NO: 1132 - RNA, 21 nt, Artificial Sequence
  Description of Artificial Sequence:  siNA sense region
  misc_feature (20)..(21): n stands for thymidine
uguggaguugacucggugunn

SEQ ID NO: 1133 - RNA, 21 nt, Artificial Sequence
  Description of Artificial Sequence:  siNA antisense region
  misc_feature (20)..(21): n stands for thymidine
uucucuggcaguaggucugnn

SEQ ID NO: 1134 - RNA, 21 nt, Artificial Sequence
  Description of Artificial Sequence:  siNA antisense region
  misc_feature (20)..(21): n stands for thymidine
cugucaggaacccugugugnn

SEQ ID NO: 1135 - RNA, 21 nt, Artificial Sequence
  Description of Artificial Sequence:  siNA antisense region
  misc_feature (20)..(21): n stands for thymidine
gaugccagugacuagagccnn

SEQ ID NO: 1136 - RNA, 21 nt, Artificial Sequence
  Description of Artificial Sequence:  siNA antisense region
  misc_feature (20)..(21): n stands for thymidine
acaccgagucaacuccacann

SEQ ID NO: 1137 - RNA, 21 nt, Artificial Sequence
  Description of Artificial Sequence:  siNA sense region
  misc_feature (1)..(1): 5'-3 attached terminal deoxyabasic moeity
  misc_feature (21)..(21): 3'-3 attached terminal deoxyabasic moeity
  misc_feature (1)..(1): 2'-deoxy-2'-fluoro cytidine
  misc_feature (5)..(6): 2'-deoxy-2'-fluoro cytidine
  misc_feature (9)..(9): 2'-deoxy-2'-fluoro cytidine
  misc_feature (12)..(13): 2'-deoxy-2'-fluoro cytidine
  misc_feature (7)..(7): 2'-deoxy-2'-fluoro uridine
  misc_feature (10)..(10): 2'-deoxy-2'-fluoro uridine
  misc_feature (20)..(21): n stands for thymidine
cagaccuacugccagagaann

SEQ ID NO: 1138 - RNA, 21 nt, Artificial Sequence
  Description of Artificial Sequence:  siNA sense region
  misc_feature (1)..(1): 5'-3 attached terminal deoxyabasic moeity
  misc_feature (21)..(21): 3'-3 attached terminal deoxyabasic moeity
  misc_feature (1)..(1): 2'-deoxy-2'-fluoro cytidine
  misc_feature (3)..(3): 2'-deoxy-2'-fluoro cytidine
  misc_feature (5)..(5): 2'-deoxy-2'-fluoro cytidine
  misc_feature (12)..(13): 2'-deoxy-2'-fluoro cytidine
  misc_feature (17)..(17): 2'-deoxy-2'-fluoro cytidine
  misc_feature (10)..(11): 2'-deoxy-2'-fluoro uridine
  misc_feature (14)..(14): 2'-deoxy-2'-fluoro uridine
  misc_feature (20)..(21): n stands for thymidine
cacacaggguuccugacagnn

SEQ ID NO: 1139 - RNA, 21 nt, Artificial Sequence
  Description of Artificial Sequence:  siNA sense region
  misc_feature (1)..(1): 5'-3 attached terminal deoxyabasic moeity
  misc_feature (21)..(21): 3'-3 attached terminal deoxyabasic moeity
  misc_feature (3)..(3): 2'-deoxy-2'-fluoro cytidine
  misc_feature (5)..(5): 2'-deoxy-2'-fluoro cytidine
  misc_feature (10)..(10): 2'-deoxy-2'-fluoro cytidine
  misc_feature (12)..(12): 2'-deoxy-2'-fluoro cytidine
  misc_feature (16)..(16): 2'-deoxy-2'-fluoro cytidine
  misc_feature (19)..(19): 2'-deoxy-2'-fluoro cytidine
  misc_feature (4)..(4): 2'-deoxy-2'-fluoro uridine
  misc_feature (6)..(6): 2'-deoxy-2'-fluoro uridine
  misc_feature (9)..(9): 2'-deoxy-2'-fluoro uridine
  misc_feature (13)..(13): 2'-deoxy-2'-fluoro uridine
  misc_feature (18)..(18): 2'-deoxy-2'-fluoro uridine
  misc_feature (20)..(21): n stands for thymidine
ggcucuagucacuggcaucnn

SEQ ID NO: 1140 - RNA, 21 nt, Artificial Sequence
  Description of Artificial Sequence:  siNA sense region
  misc_feature (1)..(1): 5'-3 attached terminal deoxyabasic moeity
  misc_feature (21)..(21): 3'-3 attached terminal deoxyabasic moeity
  misc_feature (12)..(12): 2'-deoxy-2'-fluoro cytidine
  misc_feature (14)..(14): 2'-deoxy-2'-fluoro cytidine
  misc_feature (1)..(1): 2'-deoxy-2'-fluoro uridine
  misc_feature (3)..(3): 2'-deoxy-2'-fluoro uridine
  misc_feature (8)..(9): 2'-deoxy-2'-fluoro uridine
  misc_feature (13)..(13): 2'-deoxy-2'-fluoro uridine
  misc_feature (17)..(17): 2'-deoxy-2'-fluoro uridine
  misc_feature (19)..(19): 2'-deoxy-2'-fluoro uridine
  misc_feature (20)..(21): n stands for thymidine
uguggaguugacucggugunn

SEQ ID NO: 1141 - RNA, 21 nt, Artificial Sequence
  Description of Artificial Sequence:  siNA antisense region
  misc_feature (3)..(3): 2'-deoxy-2'-fluoro cytidine
  misc_feature (5)..(5): 2'-deoxy-2'-fluoro cytidine
  misc_feature (9)..(9): 2'-deoxy-2'-fluoro cytidine
  misc_feature (17)..(17): 2'-deoxy-2'-fluoro cytidine
  misc_feature (1)..(2): 2'-deoxy-2'-fluoro uridine
  misc_feature (4)..(4): 2'-deoxy-2'-fluoro uridine
  misc_feature (6)..(6): 2'-deoxy-2'-fluoro uridine
  misc_feature (12)..(12): 2'-deoxy-2'-fluoro uridine
  misc_feature (16)..(16): 2'-deoxy-2'-fluoro uridine
  misc_feature (18)..(18): 2'-deoxy-2'-fluoro uridine
  misc_feature (20)..(20): Phosphorothioate 3'-Internucleotide Linkage
  misc_feature (20)..(21): n stands for thymidine
uucucuggcaguaggucugnn

SEQ ID NO: 1142 - RNA, 21 nt, Artificial Sequence
  Description of Artificial Sequence:  siNA antisense region
  misc_feature (1)..(1): 2'-deoxy-2'-fluoro cytidine
  misc_feature (5)..(5): 2'-deoxy-2'-fluoro cytidine
  misc_feature (11)..(13): 2'-deoxy-2'-fluoro cytidine
  misc_feature (2)..(2): 2'-deoxy-2'-fluoro uridine
  misc_feature (4)..(4): 2'-deoxy-2'-fluoro uridine
  misc_feature (14)..(14): 2'-deoxy-2'-fluoro uridine
  misc_feature (16)..(16): 2'-deoxy-2'-fluoro uridine
  misc_feature (18)..(18): 2'-deoxy-2'-fluoro uridine
  misc_feature (20)..(20): Phosphorothioate 3'-Internucleotide Linkage
  misc_feature (20)..(21): n stands for thymidine
cugucaggaacccugugugnn

SEQ ID NO: 1143 - RNA, 21 nt, Artificial Sequence
  Description of Artificial Sequence:  siNA antisense region
  misc_feature (5)..(6): 2'-deoxy-2'-fluoro cytidine
  misc_feature (12)..(12): 2'-deoxy-2'-fluoro cytidine
  misc_feature (18)..(19): 2'-deoxy-2'-fluoro cytidine
  misc_feature (3)..(3): 2'-deoxy-2'-fluoro uridine
  misc_feature (9)..(9): 2'-deoxy-2'-fluoro uridine
  misc_feature (13)..(13): 2'-deoxy-2'-fluoro uridine
  misc_feature (20)..(20): Phosphorothioate 3'-Internucleotide Linkage
  misc_feature (20)..(21): n stands for thymidine
gaugccagugacuagagccnn

SEQ ID NO: 1144 - RNA, 21 nt, Artificial Sequence
  Description of Artificial Sequence:  siNA antisense region
  misc_feature (2)..(2): 2'-deoxy-2'-fluoro cytidine
  misc_feature (4)..(5): 2'-deoxy-2'-fluoro cytidine
  misc_feature (10)..(10): 2'-deoxy-2'-fluoro cytidine
  misc_feature (13)..(13): 2'-deoxy-2'-fluoro cytidine
  misc_feature (15)..(16): 2'-deoxy-2'-fluoro cytidine
  misc_feature (18)..(18): 2'-deoxy-2'-fluoro cytidine
  misc_feature (9)..(9): 2'-deoxy-2'-fluoro uridine
  misc_feature (14)..(14): 2'-deoxy-2'-fluoro uridine
  misc_feature (20)..(20): Phosphorothioate 3'-Internucleotide Linkage
  misc_feature (20)..(21): n stands for thymidine
acaccgagucaacuccacann

SEQ ID NO: 1145 - RNA, 21 nt, Artificial Sequence
  Description of Artificial Sequence:  siNA sense region
  misc_feature (1)..(1): 5'-3 attached terminal deoxyabasic moeity
  misc_feature (21)..(21): 3'-3 attached terminal deoxyabasic moeity
  misc_feature (1)..(1): 2'-deoxy-2'-fluoro cytidine
  misc_feature (5)..(6): 2'-deoxy-2'-fluoro cytidine
  misc_feature (9)..(9): 2'-deoxy-2'-fluoro cytidine
  misc_feature (12)..(13): 2'-deoxy-2'-fluoro cytidine
  misc_feature (7)..(7): 2'-deoxy-2'-fluoro uridine
  misc_feature (10)..(10): 2'-deoxy-2'-fluoro uridine
  misc_feature (2)..(2): 2'-deoxy Adenosine
  misc_feature (4)..(4): 2'-deoxy Adenosine
  misc_feature (8)..(8): 2'-deoxy Adenosine
  misc_feature (14)..(14): 2'-deoxy Adenosine
  misc_feature (16)..(16): 2'-deoxy Adenosine
  misc_feature (18)..(19): 2'-deoxy Adenosine
  misc_feature (3)..(3): 2'-deoxy Guanosine
  misc_feature (11)..(11): 2'-deoxy Guanosine
  misc_feature (15)..(15): 2'-deoxy Guanosine
  misc_feature (17)..(17): 2'-deoxy Guanosine
  misc_feature (20)..(21): n stands for thymidine
cagaccuacugccagagaann

SEQ ID NO: 1146 - RNA, 21 nt, Artificial Sequence
  Description of Artificial Sequence:  siNA sense region
  misc_feature (1)..(1): 5'-3 attached terminal deoxyabasic moeity
  misc_feature (21)..(21): 3'-3 attached terminal deoxyabasic moeity
  misc_feature (1)..(1): 2'-deoxy-2'-fluoro cytidine
  misc_feature (3)..(3): 2'-deoxy-2'-fluoro cytidine
  misc_feature (5)..(5): 2'-deoxy-2'-fluoro cytidine
  misc_feature (12)..(13): 2'-deoxy-2'-fluoro cytidine
  misc_feature (17)..(17): 2'-deoxy-2'-fluoro cytidine
  misc_feature (10)..(11): 2'-deoxy-2'-fluoro uridine
  misc_feature (14)..(14): 2'-deoxy-2'-fluoro uridine
  misc_feature (2)..(2): 2'-deoxy Adenosine
  misc_feature (4)..(4): 2'-deoxy Adenosine
  misc_feature (6)..(6): 2'-deoxy Adenosine
  misc_feature (16)..(16): 2'-deoxy Adenosine
  misc_feature (18)..(18): 2'-deoxy Adenosine
  misc_feature (7)..(9): 2'-deoxy Guanosine
  misc_feature (15)..(15): 2'-deoxy Guanosine
  misc_feature (19)..(19): 2'-deoxy Guanosine
  misc_feature (20)..(21): n stands for thymidine
cacacaggguuccugacagnn

SEQ ID NO: 1147 - RNA, 21 nt, Artificial Sequence
  Description of Artificial Sequence:  siNA sense region
  misc_feature (1)..(1): 5'-3 attached terminal deoxyabasic moeity
  misc_feature (21)..(21): 3'-3 attached terminal deoxyabasic moeity
  misc_feature (3)..(3): 2'-deoxy-2'-fluoro cytidine
  misc_feature (5)..(5): 2'-deoxy-2'-fluoro cytidine
  misc_feature (10)..(10): 2'-deoxy-2'-fluoro cytidine
  misc_feature (12)..(12): 2'-deoxy-2'-fluoro cytidine
  misc_feature (16)..(16): 2'-deoxy-2'-fluoro cytidine
  misc_feature (19)..(19): 2'-deoxy-2'-fluoro cytidine
  misc_feature (4)..(4): 2'-deoxy-2'-fluoro uridine
  misc_feature (6)..(6): 2'-deoxy-2'-fluoro uridine
  misc_feature (9)..(9): 2'-deoxy-2'-fluoro uridine
  misc_feature (13)..(13): 2'-deoxy-2'-fluoro uridine
  misc_feature (18)..(18): 2'-deoxy-2'-fluoro uridine
  misc_feature (7)..(7): 2'-deoxy Adenosine
  misc_feature (11)..(11): 2'-deoxy Adenosine
  misc_feature (17)..(17): 2'-deoxy Adenosine
  misc_feature (1)..(2): 2'-deoxy Guanosine
  misc_feature (8)..(8): 2'-deoxy Guanosine
  misc_feature (14)..(15): 2'-deoxy Guanosine
  misc_feature (20)..(21): n stands for thymidine
ggcucuagucacuggcaucnn

SEQ ID NO: 1148 - RNA, 21 nt, Artificial Sequence
  Description of Artificial Sequence:  siNA sense region
  misc_feature (1)..(1): 5'-3 attached terminal deoxyabasic moeity
  misc_feature (21)..(21): 3'-3 attached terminal deoxyabasic moeity
  misc_feature (12)..(12): 2'-deoxy-2'-fluoro cytidine
  misc_feature (14)..(14): 2'-deoxy-2'-fluoro cytidine
  misc_feature (1)..(1): 2'-deoxy-2'-fluoro uridine
  misc_feature (3)..(3): 2'-deoxy-2'-fluoro uridine
  misc_feature (8)..(9): 2'-deoxy-2'-fluoro uridine
  misc_feature (13)..(13): 2'-deoxy-2'-fluoro uridine
  misc_feature (17)..(17): 2'-deoxy-2'-fluoro uridine
  misc_feature (19)..(19): 2'-deoxy-2'-fluoro uridine
  misc_feature (6)..(6): 2'-deoxy Adenosine
  misc_feature (11)..(11): 2'-deoxy Adenosine
  misc_feature (2)..(2): 2'-deoxy Guanosine
  misc_feature (4)..(5): 2'-deoxy Guanosine
  misc_feature (7)..(7): 2'-deoxy Guanosine
  misc_feature (10)..(10): 2'-deoxy Guanosine
  misc_feature (15)..(16): 2'-deoxy Guanosine
  misc_feature (18)..(18): 2'-deoxy Guanosine
  misc_feature (20)..(21): n stands for thymidine
uguggaguugacucggugunn

SEQ ID NO: 1149 - RNA, 21 nt, Artificial Sequence
  Description of Artificial Sequence:  siNA antisense region
  misc_feature (3)..(3): 2'-deoxy-2'-fluoro cytidine
  misc_feature (5)..(5): 2'-deoxy-2'-fluoro cytidine
  misc_feature (9)..(9): 2'-deoxy-2'-fluoro cytidine
  misc_feature (17)..(17): 2'-deoxy-2'-fluoro cytidine
  misc_feature (1)..(2): 2'-deoxy-2'-fluoro uridine
  misc_feature (4)..(4): 2'-deoxy-2'-fluoro uridine
  misc_feature (6)..(6): 2'-deoxy-2'-fluoro uridine
  misc_feature (12)..(12): 2'-deoxy-2'-fluoro uridine
  misc_feature (16)..(16): 2'-deoxy-2'-fluoro uridine
  misc_feature (18)..(18): 2'-deoxy-2'-fluoro uridine
  misc_feature (10)..(10): 2'-deoxy Adenosine
  misc_feature (13)..(13): 2'-deoxy Adenosine
  misc_feature (7)..(8): 2'-deoxy Guanosine
  misc_feature (11)..(11): 2'-deoxy Guanosine
  misc_feature (14)..(15): 2'-deoxy Guanosine
  misc_feature (19)..(19): 2'-deoxy Guanosine
  misc_feature (20)..(20): Phosphorothioate 3'-Internucleotide Linkage
  misc_feature (20)..(21): n stands for thymidine
uucucuggcaguaggucugnn

SEQ ID NO: 1150 - RNA, 21 nt, Artificial Sequence
  Description of Artificial Sequence:  siNA antisense region
  misc_feature (1)..(1): 2'-deoxy-2'-fluoro cytidine
  misc_feature (5)..(5): 2'-deoxy-2'-fluoro cytidine
  misc_feature (11)..(13): 2'-deoxy-2'-fluoro cytidine
  misc_feature (2)..(2): 2'-deoxy-2'-fluoro uridine
  misc_feature (4)..(4): 2'-deoxy-2'-fluoro uridine
  misc_feature (14)..(14): 2'-deoxy-2'-fluoro uridine
  misc_feature (16)..(16): 2'-deoxy-2'-fluoro uridine
  misc_feature (18)..(18): 2'-deoxy-2'-fluoro uridine
  misc_feature (6)..(6): 2'-deoxy Adenosine
  misc_feature (9)..(10): 2'-deoxy Adenosine
  misc_feature (3)..(3): 2'-deoxy Guanosine
  misc_feature (7)..(8): 2'-deoxy Guanosine
  misc_feature (15)..(15): 2'-deoxy Guanosine
  misc_feature (17)..(17): 2'-deoxy Guanosine
  misc_feature (19)..(19): 2'-deoxy Guanosine
  misc_feature (20)..(20): Phosphorothioate 3'-Internucleotide Linkage
  misc_feature (20)..(21): n stands for thymidine
cugucaggaacccugugugnn

SEQ ID NO: 1151 - RNA, 21 nt, Artificial Sequence
  Description of Artificial Sequence:  siNA antisense region
  misc_feature (5)..(6): 2'-deoxy-2'-fluoro cytidine
  misc_feature (12)..(12): 2'-deoxy-2'-fluoro cytidine
  misc_feature (18)..(19): 2'-deoxy-2'-fluoro cytidine
  misc_feature (3)..(3): 2'-deoxy-2'-fluoro uridine
  misc_feature (9)..(9): 2'-deoxy-2'-fluoro uridine
  misc_feature (13)..(13): 2'-deoxy-2'-fluoro uridine
  misc_feature (2)..(2): 2'-deoxy Adenosine
  misc_feature (7)..(7): 2'-deoxy Adenosine
  misc_feature (11)..(11): 2'-deoxy Adenosine
  misc_feature (14)..(14): 2'-deoxy Adenosine
  misc_feature (16)..(16): 2'-deoxy Adenosine
  misc_feature (1)..(1): 2'-deoxy Guanosine
  misc_feature (4)..(4): 2'-deoxy Guanosine
  misc_feature (8)..(8): 2'-deoxy Guanosine
  misc_feature (10)..(10): 2'-deoxy Guanosine
  misc_feature (15)..(15): 2'-deoxy Guanosine
  misc_feature (17)..(17): 2'-deoxy Guanosine
  misc_feature (20)..(20): Phosphorothioate 3'-Internucleotide Linkage
  misc_feature (20)..(21): n stands for thymidine
gaugccagugacuagagccnn

SEQ ID NO: 1152 - RNA, 21 nt, Artificial Sequence
  Description of Artificial Sequence:  siNA antisense region
  misc_feature (2)..(2): 2'-deoxy-2'-fluoro cytidine
  misc_feature (4)..(5): 2'-deoxy-2'-fluoro cytidine
  misc_feature (10)..(10): 2'-deoxy-2'-fluoro cytidine
  misc_feature (13)..(13): 2'-deoxy-2'-fluoro cytidine
  misc_feature (15)..(16): 2'-deoxy-2'-fluoro cytidine
  misc_feature (18)..(18): 2'-deoxy-2'-fluoro cytidine
  misc_feature (9)..(9): 2'-deoxy-2'-fluoro uridine
  misc_feature (14)..(14): 2'-deoxy-2'-fluoro uridine
  misc_feature (1)..(1): 2'-deoxy Adenosine
  misc_feature (3)..(3): 2'-deoxy Adenosine
  misc_feature (7)..(7): 2'-deoxy Adenosine
  misc_feature (11)..(12): 2'-deoxy Adenosine
  misc_feature (17)..(17): 2'-deoxy Adenosine
  misc_feature (19)..(19): 2'-deoxy Adenosine
  misc_feature (6)..(6): 2'-deoxy Guanosine
  misc_feature (8)..(8): 2'-deoxy Guanosine
  misc_feature (20)..(20): Phosphorothioate 3'-Internucleotide Linkage
  misc_feature (20)..(21): n stands for thymidine
acaccgagucaacuccacann

SEQ ID NO: 1153 - RNA, 21 nt, Artificial Sequence
  Description of Artificial Sequence:  siNA sense region
  misc_feature (20)..(21): n stands for thymidine
uucgaacaucagaccuacunn

SEQ ID NO: 1154 - RNA, 21 nt, Artificial Sequence
  Description of Artificial Sequence:  siNA sense region
  misc_feature (20)..(21): n stands for thymidine
aacuccaagggcuauaccann

SEQ ID NO: 1155 - RNA, 21 nt, Artificial Sequence
  Description of Artificial Sequence:  siNA sense region
  misc_feature (20)..(21): n stands for thymidine
ggcuauaccaaguccaucgnn

SEQ ID NO: 1156 - RNA, 21 nt, Artificial Sequence
  Description of Artificial Sequence:  siNA sense region
  misc_feature (20)..(21): n stands for thymidine
cuguguguggugagcagaann

SEQ ID NO: 1157 - RNA, 21 nt, Artificial Sequence
  Description of Artificial Sequence:  siNA antisense region
  misc_feature (20)..(21): n stands for thymidine
aguaggucugauguucgaann

SEQ ID NO: 1158 - RNA, 21 nt, Artificial Sequence
  Description of Artificial Sequence:  siNA antisense region
  misc_feature (20)..(21): n stands for thymidine
ugguauagcccuuggaguunn

SEQ ID NO: 1159 - RNA, 21 nt, Artificial Sequence
  Description of Artificial Sequence:  siNA antisense region
  misc_feature (20)..(21): n stands for thymidine
cgauggacuugguauagccnn

SEQ ID NO: 1160 - RNA, 21 nt, Artificial Sequence
  Description of Artificial Sequence:  siNA antisense region
  misc_feature (20)..(21): n stands for thymidine
uucugcucaccacacacagnn

SEQ ID NO: 1161 - RNA, 21 nt, Artificial Sequence
  Description of Artificial Sequence:  siNA sense region
  misc_feature (1)..(1): 5'-3 attached terminal deoxyabasic moeity
  misc_feature (21)..(21): 3'-3 attached terminal deoxyabasic moeity
  misc_feature (3)..(3): 2'-deoxy-2'-fluoro cytidine
  misc_feature (7)..(7): 2'-deoxy-2'-fluoro cytidine
  misc_feature (10)..(10): 2'-deoxy-2'-fluoro cytidine
  misc_feature (14)..(15): 2'-deoxy-2'-fluoro cytidine
  misc_feature (18)..(18): 2'-deoxy-2'-fluoro cytidine
  misc_feature (1)..(2): 2'-deoxy-2'-fluoro uridine
  misc_feature (9)..(9): 2'-deoxy-2'-fluoro uridine
  misc_feature (16)..(16): 2'-deoxy-2'-fluoro uridine
  misc_feature (19)..(19): 2'-deoxy-2'-fluoro uridine
  misc_feature (20)..(21): n stands for thymidine
uucgaacaucagaccuacunn

SEQ ID NO: 1162 - RNA, 21 nt, Artificial Sequence
  Description of Artificial Sequence:  siNA sense region
  misc_feature (1)..(1): 5'-3 attached terminal deoxyabasic moeity
  misc_feature (21)..(21): 3'-3 attached terminal deoxyabasic moeity
  misc_feature (3)..(3): 2'-deoxy-2'-fluoro cytidine
  misc_feature (5)..(6): 2'-deoxy-2'-fluoro cytidine
  misc_feature (12)..(12): 2'-deoxy-2'-fluoro cytidine
  misc_feature (17)..(18): 2'-deoxy-2'-fluoro cytidine
  misc_feature (4)..(4): 2'-deoxy-2'-fluoro uridine
  misc_feature (13)..(13): 2'-deoxy-2'-fluoro uridine
  misc_feature (15)..(15): 2'-deoxy-2'-fluoro uridine
  misc_feature (20)..(21): n stands for thymidine
aacuccaagggcuauaccann

SEQ ID NO: 1163 - RNA, 21 nt, Artificial Sequence
  Description of Artificial Sequence:  siNA sense region
  misc_feature (1)..(1): 5'-3 attached terminal deoxyabasic moeity
  misc_feature (21)..(21): 3'-3 attached terminal deoxyabasic moeity
  misc_feature (3)..(3): 2'-deoxy-2'-fluoro cytidine
  misc_feature (8)..(9): 2'-deoxy-2'-fluoro cytidine
  misc_feature (14)..(15): 2'-deoxy-2'-fluoro cytidine
  misc_feature (18)..(18): 2'-deoxy-2'-fluoro cytidine
  misc_feature (4)..(4): 2'-deoxy-2'-fluoro uridine
  misc_feature (6)..(6): 2'-deoxy-2'-fluoro uridine
  misc_feature (13)..(13): 2'-deoxy-2'-fluoro uridine
  misc_feature (17)..(17): 2'-deoxy-2'-fluoro uridine
  misc_feature (20)..(21): n stands for thymidine
ggcuauaccaaguccaucgnn

SEQ ID NO: 1164 - RNA, 21 nt, Artificial Sequence
  Description of Artificial Sequence:  siNA sense region
  misc_feature (1)..(1): 5'-3 attached terminal deoxyabasic moeity
  misc_feature (21)..(21): 3'-3 attached terminal deoxyabasic moeity
  misc_feature (1)..(1): 2'-deoxy-2'-fluoro cytidine
  misc_feature (15)..(15): 2'-deoxy-2'-fluoro cytidine
  misc_feature (2)..(2): 2'-deoxy-2'-fluoro uridine
  misc_feature (4)..(4): 2'-deoxy-2'-fluoro uridine
  misc_feature (6)..(6): 2'-deoxy-2'-fluoro uridine
  misc_feature (8)..(8): 2'-deoxy-2'-fluoro uridine
  misc_feature (11)..(11): 2'-deoxy-2'-fluoro uridine
  misc_feature (20)..(21): n stands for thymidine
cuguguguggugagcagaann

SEQ ID NO: 1165 - RNA, 21 nt, Artificial Sequence
  Description of Artificial Sequence:  siNA antisense region
  misc_feature (8)..(8): 2'-deoxy-2'-fluoro cytidine
  misc_feature (16)..(16): 2'-deoxy-2'-fluoro cytidine
  misc_feature (3)..(3): 2'-deoxy-2'-fluoro uridine
  misc_feature (7)..(7): 2'-deoxy-2'-fluoro uridine
  misc_feature (9)..(9): 2'-deoxy-2'-fluoro uridine
  misc_feature (12)..(12): 2'-deoxy-2'-fluoro uridine
  misc_feature (14)..(15): 2'-deoxy-2'-fluoro uridine
  misc_feature (20)..(20): Phosphorothioate 3'-Internucleotide Linkage
  misc_feature (20)..(21): n stands for thymidine
aguaggucugauguucgaann

SEQ ID NO: 1166 - RNA, 21 nt, Artificial Sequence
  Description of Artificial Sequence:  siNA antisense region
  misc_feature (9)..(11): 2'-deoxy-2'-fluoro cytidine
  misc_feature (1)..(1): 2'-deoxy-2'-fluoro uridine
  misc_feature (4)..(4): 2'-deoxy-2'-fluoro uridine
  misc_feature (6)..(6): 2'-deoxy-2'-fluoro uridine
  misc_feature (12)..(13): 2'-deoxy-2'-fluoro uridine
  misc_feature (18)..(19): 2'-deoxy-2'-fluoro uridine
  misc_feature (20)..(20): Phosphorothioate 3'-Internucleotide Linkage
  misc_feature (20)..(21): n stands for thymidine
ugguauagcccuuggaguunn

SEQ ID NO: 1167 - RNA, 21 nt, Artificial Sequence
  Description of Artificial Sequence:  siNA antisense region
  misc_feature (1)..(1): 2'-deoxy-2'-fluoro cytidine
  misc_feature (8)..(8): 2'-deoxy-2'-fluoro cytidine
  misc_feature (18)..(19): 2'-deoxy-2'-fluoro cytidine
  misc_feature (4)..(4): 2'-deoxy-2'-fluoro uridine
  misc_feature (9)..(10): 2'-deoxy-2'-fluoro uridine
  misc_feature (13)..(13): 2'-deoxy-2'-fluoro uridine
  misc_feature (15)..(15): 2'-deoxy-2'-fluoro uridine
  misc_feature (20)..(20): Phosphorothioate 3'-Internucleotide Linkage
  misc_feature (20)..(21): n stands for thymidine
cgauggacuugguauagccnn

SEQ ID NO: 1168 - RNA, 21 nt, Artificial Sequence
  Description of Artificial Sequence:  siNA antisense region
  misc_feature (3)..(3): 2'-deoxy-2'-fluoro cytidine
  misc_feature (6)..(6): 2'-deoxy-2'-fluoro cytidine
  misc_feature (8)..(8): 2'-deoxy-2'-fluoro cytidine
  misc_feature (10)..(11): 2'-deoxy-2'-fluoro cytidine
  misc_feature (13)..(13): 2'-deoxy-2'-fluoro cytidine
  misc_feature (15)..(15): 2'-deoxy-2'-fluoro cytidine
  misc_feature (17)..(17): 2'-deoxy-2'-fluoro cytidine
  misc_feature (1)..(2): 2'-deoxy-2'-fluoro uridine
  misc_feature (4)..(4): 2'-deoxy-2'-fluoro uridine
  misc_feature (7)..(7): 2'-deoxy-2'-fluoro uridine
  misc_feature (20)..(20): Phosphorothioate 3'-Internucleotide Linkage
  misc_feature (20)..(21): n stands for thymidine
uucugcucaccacacacagnn

SEQ ID NO: 1169 - RNA, 21 nt, Artificial Sequence
  Description of Artificial Sequence:  siNA sense region
  misc_feature (1)..(1): 5'-3 attached terminal deoxyabasic moeity
  misc_feature (21)..(21): 3'-3 attached terminal deoxyabasic moeity
  misc_feature (3)..(3): 2'-deoxy-2'-fluoro cytidine
  misc_feature (7)..(7): 2'-deoxy-2'-fluoro cytidine
  misc_feature (10)..(10): 2'-deoxy-2'-fluoro cytidine
  misc_feature (14)..(15): 2'-deoxy-2'-fluoro cytidine
  misc_feature (18)..(18): 2'-deoxy-2'-fluoro cytidine
  misc_feature (1)..(2): 2'-deoxy-2'-fluoro uridine
  misc_feature (9)..(9): 2'-deoxy-2'-fluoro uridine
  misc_feature (16)..(16): 2'-deoxy-2'-fluoro uridine
  misc_feature (19)..(19): 2'-deoxy-2'-fluoro uridine
  misc_feature (5)..(6): 2'-deoxy Adenosine
  misc_feature (8)..(8): 2'-deoxy Adenosine
  misc_feature (11)..(11): 2'-deoxy Adenosine
  misc_feature (13)..(13): 2'-deoxy Adenosine
  misc_feature (17)..(17): 2'-deoxy Adenosine
  misc_feature (4)..(4): 2'-deoxy Guanosine
  misc_feature (12)..(12): 2'-deoxy Guanosine
  misc_feature (20)..(21): n stands for thymidine
uucgaacaucagaccuacunn

SEQ ID NO: 1170 - RNA, 21 nt, Artificial Sequence
  Description of Artificial Sequence:  siNA sense region
  misc_feature (1)..(1): 5'-3 attached terminal deoxyabasic moeity
  misc_feature (21)..(21): 3'-3 attached terminal deoxyabasic moeity
  misc_feature (3)..(3): 2'-deoxy-2'-fluoro cytidine
  misc_feature (5)..(6): 2'-deoxy-2'-fluoro cytidine
  misc_feature (12)..(12): 2'-deoxy-2'-fluoro cytidine
  misc_feature (17)..(18): 2'-deoxy-2'-fluoro cytidine
  misc_feature (4)..(4): 2'-deoxy-2'-fluoro uridine
  misc_feature (13)..(13): 2'-deoxy-2'-fluoro uridine
  misc_feature (15)..(15): 2'-deoxy-2'-fluoro uridine
  misc_feature (1)..(2): 2'-deoxy Adenosine
  misc_feature (7)..(8): 2'-deoxy Adenosine
  misc_feature (14)..(14): 2'-deoxy Adenosine
  misc_feature (16)..(16): 2'-deoxy Adenosine
  misc_feature (19)..(19): 2'-deoxy Adenosine
  misc_feature (9)..(11): 2'-deoxy Guanosine
  misc_feature (20)..(21): n stands for thymidine
aacuccaagggcuauaccann

SEQ ID NO: 1171 - RNA, 21 nt, Artificial Sequence
  Description of Artificial Sequence:  siNA sense region
  misc_feature (1)..(1): 5'-3 attached terminal deoxyabasic moeity
  misc_feature (21)..(21): 3'-3 attached terminal deoxyabasic moeity
  misc_feature (3)..(3): 2'-deoxy-2'-fluoro cytidine
  misc_feature (8)..(9): 2'-deoxy-2'-fluoro cytidine
  misc_feature (14)..(15): 2'-deoxy-2'-fluoro cytidine
  misc_feature (18)..(18): 2'-deoxy-2'-fluoro cytidine
  misc_feature (4)..(4): 2'-deoxy-2'-fluoro uridine
  misc_feature (6)..(6): 2'-deoxy-2'-fluoro uridine
  misc_feature (13)..(13): 2'-deoxy-2'-fluoro uridine
  misc_feature (17)..(17): 2'-deoxy-2'-fluoro uridine
  misc_feature (5)..(5): 2'-deoxy Adenosine
  misc_feature (7)..(7): 2'-deoxy Adenosine
  misc_feature (10)..(11): 2'-deoxy Adenosine
  misc_feature (16)..(16): 2'-deoxy Adenosine
  misc_feature (1)..(2): 2'-deoxy Guanosine
  misc_feature (12)..(12): 2'-deoxy Guanosine
  misc_feature (19)..(19): 2'-deoxy Guanosine
  misc_feature (20)..(21): n stands for thymidine
ggcuauaccaaguccaucgnn

SEQ ID NO: 1172 - RNA, 21 nt, Artificial Sequence
  Description of Artificial Sequence:  siNA sense region
  misc_feature (1)..(1): 5'-3 attached terminal deoxyabasic moeity
  misc_feature (21)..(21): 3'-3 attached terminal deoxyabasic moeity
  misc_feature (1)..(1): 2'-deoxy-2'-fluoro cytidine
  misc_feature (15)..(15): 2'-deoxy-2'-fluoro cytidine
  misc_feature (2)..(2): 2'-deoxy-2'-fluoro uridine
  misc_feature (4)..(4): 2'-deoxy-2'-fluoro uridine
  misc_feature (6)..(6): 2'-deoxy-2'-fluoro uridine
  misc_feature (8)..(8): 2'-deoxy-2'-fluoro uridine
  misc_feature (11)..(11): 2'-deoxy-2'-fluoro uridine
  misc_feature (13)..(13): 2'-deoxy Adenosine
  misc_feature (16)..(16): 2'-deoxy Adenosine
  misc_feature (18)..(19): 2'-deoxy Adenosine
  misc_feature (3)..(3): 2'-deoxy Guanosine
  misc_feature (5)..(5): 2'-deoxy Guanosine
  misc_feature (7)..(7): 2'-deoxy Guanosine
  misc_feature (9)..(10): 2'-deoxy Guanosine
  misc_feature (12)..(12): 2'-deoxy Guanosine
  misc_feature (14)..(14): 2'-deoxy Guanosine
  misc_feature (17)..(17): 2'-deoxy Guanosine
  misc_feature (20)..(21): n stands for thymidine
cuguguguggugagcagaann

SEQ ID NO: 1173 - RNA, 21 nt, Artificial Sequence
  Description of Artificial Sequence:  siNA antisense region
  misc_feature (8)..(8): 2'-deoxy-2'-fluoro cytidine
  misc_feature (16)..(16): 2'-deoxy-2'-fluoro cytidine
  misc_feature (3)..(3): 2'-deoxy-2'-fluoro uridine
  misc_feature (7)..(7): 2'-deoxy-2'-fluoro uridine
  misc_feature (9)..(9): 2'-deoxy-2'-fluoro uridine
  misc_feature (12)..(12): 2'-deoxy-2'-fluoro uridine
  misc_feature (14)..(15): 2'-deoxy-2'-fluoro uridine
  misc_feature (1)..(1): 2'-deoxy Adenosine
  misc_feature (4)..(4): 2'-deoxy Adenosine
  misc_feature (11)..(11): 2'-deoxy Adenosine
  misc_feature (18)..(19): 2'-deoxy Adenosine
  misc_feature (2)..(2): 2'-deoxy Guanosine
  misc_feature (5)..(6): 2'-deoxy Guanosine
  misc_feature (10)..(10): 2'-deoxy Guanosine
  misc_feature (13)..(13): 2'-deoxy Guanosine
  misc_feature (17)..(17): 2'-deoxy Guanosine
  misc_feature (20)..(20): Phosphorothioate 3'-Internucleotide Linkage
  misc_feature (20)..(21): n stands for thymidine
aguaggucugauguucgaann

SEQ ID NO: 1174 - RNA, 21 nt, Artificial Sequence
  Description of Artificial Sequence:  siNA antisense region
  misc_feature (9)..(11): 2'-deoxy-2'-fluoro cytidine
  misc_feature (1)..(1): 2'-deoxy-2'-fluoro uridine
  misc_feature (4)..(4): 2'-deoxy-2'-fluoro uridine
  misc_feature (6)..(6): 2'-deoxy-2'-fluoro uridine
  misc_feature (12)..(13): 2'-deoxy-2'-fluoro uridine
  misc_feature (18)..(19): 2'-deoxy-2'-fluoro uridine
  misc_feature (5)..(5): 2'-deoxy Adenosine
  misc_feature (7)..(7): 2'-deoxy Adenosine
  misc_feature (16)..(16): 2'-deoxy Adenosine
  misc_feature (2)..(3): 2'-deoxy Guanosine
  misc_feature (8)..(8): 2'-deoxy Guanosine
  misc_feature (14)..(15): 2'-deoxy Guanosine
  misc_feature (17)..(17): 2'-deoxy Guanosine
  misc_feature (20)..(20): Phosphorothioate 3'-Internucleotide Linkage
  misc_feature (20)..(21): n stands for thymidine
ugguauagcccuuggaguunn

SEQ ID NO: 1175 - RNA, 21 nt, Artificial Sequence
  Description of Artificial Sequence:  siNA antisense region
  misc_feature (1)..(1): 2'-deoxy-2'-fluoro cytidine
  misc_feature (8)..(8): 2'-deoxy-2'-fluoro cytidine
  misc_feature (18)..(19): 2'-deoxy-2'-fluoro cytidine
  misc_feature (4)..(4): 2'-deoxy-2'-fluoro uridine
  misc_feature (9)..(10): 2'-deoxy-2'-fluoro uridine
  misc_feature (13)..(13): 2'-deoxy-2'-fluoro uridine
  misc_feature (15)..(15): 2'-deoxy-2'-fluoro uridine
  misc_feature (3)..(3): 2'-deoxy Adenosine
  misc_feature (7)..(7): 2'-deoxy Adenosine
  misc_feature (14)..(14): 2'-deoxy Adenosine
  misc_feature (16)..(16): 2'-deoxy Adenosine
  misc_feature (2)..(2): 2'-deoxy Guanosine
  misc_feature (5)..(6): 2'-deoxy Guanosine
  misc_feature (11)..(12): 2'-deoxy Guanosine
  misc_feature (17)..(17): 2'-deoxy Guanosine
  misc_feature (20)..(20): Phosphorothioate 3'-Internucleotide Linkage
  misc_feature (20)..(21): n stands for thymidine
cgauggacuugguauagccnn

SEQ ID NO: 1176 - RNA, 21 nt, Artificial Sequence
  Description of Artificial Sequence:  siNA antisense region
  misc_feature (3)..(3): 2'-deoxy-2'-fluoro cytidine
  misc_feature (6)..(6): 2'-deoxy-2'-fluoro cytidine
  misc_feature (8)..(8): 2'-deoxy-2'-fluoro cytidine
  misc_feature (10)..(11): 2'-deoxy-2'-fluoro cytidine
  misc_feature (13)..(13): 2'-deoxy-2'-fluoro cytidine
  misc_feature (15)..(15): 2'-deoxy-2'-fluoro cytidine
  misc_feature (17)..(17): 2'-deoxy-2'-fluoro cytidine
  misc_feature (1)..(2): 2'-deoxy-2'-fluoro uridine
  misc_feature (4)..(4): 2'-deoxy-2'-fluoro uridine
  misc_feature (7)..(7): 2'-deoxy-2'-fluoro uridine
  misc_feature (9)..(9): 2'-deoxy Adenosine
  misc_feature (12)..(12): 2'-deoxy Adenosine
  misc_feature (14)..(14): 2'-deoxy Adenosine
  misc_feature (16)..(16): 2'-deoxy Adenosine
  misc_feature (18)..(18): 2'-deoxy Adenosine
  misc_feature (5)..(5): 2'-deoxy Guanosine
  misc_feature (19)..(19): 2'-deoxy Guanosine
  misc_feature (20)..(20): Phosphorothioate 3'-Internucleotide Linkage
  misc_feature (20)..(21): n stands for thymidine
uucugcucaccacacacagnn

SEQ ID NO: 1177 - RNA, 21 nt, Artificial Sequence
  Description of Artificial Sequence:  siNA sense region
  misc_feature (20)..(21): n stands for thymidine
cagcuuggaacaccaugucnn

SEQ ID NO: 1178 - RNA, 21 nt, Artificial Sequence
  Description of Artificial Sequence:  siNA sense region
  misc_feature (20)..(21): n stands for thymidine
uucccagcugacucagaacnn

SEQ ID NO: 1179 - RNA, 21 nt, Artificial Sequence
  Description of Artificial Sequence:  siNA sense region
  misc_feature (20)..(21): n stands for thymidine
augucaacagauccgacuunn

SEQ ID NO: 1180 - RNA, 21 nt, Artificial Sequence
  Description of Artificial Sequence:  siNA sense region
  misc_feature (20)..(21): n stands for thymidine
uuggccucugauacagacann

SEQ ID NO: 1181 - RNA, 21 nt, Artificial Sequence
  Description of Artificial Sequence:  siNA antisense region
  misc_feature (20)..(21): n stands for thymidine
gacaugguguuccaagcugnn

SEQ ID NO: 1182 - RNA, 21 nt, Artificial Sequence
  Description of Artificial Sequence:  siNA antisense region
  misc_feature (20)..(21): n stands for thymidine
guucugagucagcugggaann

SEQ ID NO: 1183 - RNA, 21 nt, Artificial Sequence
  Description of Artificial Sequence:  siNA antisense region
  misc_feature (20)..(21): n stands for thymidine
aagucggaucuguugacaunn

SEQ ID NO: 1184 - RNA, 21 nt, Artificial Sequence
  Description of Artificial Sequence:  siNA antisense region
  misc_feature (20)..(21): n stands for thymidine
ugucuguaucagaggccaann

SEQ ID NO: 1185 - RNA, 21 nt, Artificial Sequence
  Description of Artificial Sequence:  siNA antisense region
  misc_feature (1)..(1): 5'-3 attached terminal deoxyabasic moeity
  misc_feature (21)..(21): 3'-3 attached terminal deoxyabasic moeity
  misc_feature (1)..(1): 2'-deoxy-2'-fluoro cytidine
  misc_feature (4)..(4): 2'-deoxy-2'-fluoro cytidine
  misc_feature (11)..(11): 2'-deoxy-2'-fluoro cytidine
  misc_feature (13)..(14): 2'-deoxy-2'-fluoro cytidine
  misc_feature (19)..(19): 2'-deoxy-2'-fluoro cytidine
  misc_feature (5)..(6): 2'-deoxy-2'-fluoro uridine
  misc_feature (16)..(16): 2'-deoxy-2'-fluoro uridine
  misc_feature (18)..(18): 2'-deoxy-2'-fluoro uridine
  misc_feature (20)..(21): n stands for thymidine
cagcuuggaacaccaugucnn

SEQ ID NO: 1186 - RNA, 21 nt, Artificial Sequence
  Description of Artificial Sequence:  siNA antisense region
  misc_feature (1)..(1): 5'-3 attached terminal deoxyabasic moeity
  misc_feature (21)..(21): 3'-3 attached terminal deoxyabasic moeity
  misc_feature (3)..(5): 2'-deoxy-2'-fluoro cytidine
  misc_feature (8)..(8): 2'-deoxy-2'-fluoro cytidine
  misc_feature (12)..(12): 2'-deoxy-2'-fluoro cytidine
  misc_feature (14)..(14): 2'-deoxy-2'-fluoro cytidine
  misc_feature (19)..(19): 2'-deoxy-2'-fluoro cytidine
  misc_feature (1)..(2): 2'-deoxy-2'-fluoro uridine
  misc_feature (9)..(9): 2'-deoxy-2'-fluoro uridine
  misc_feature (13)..(13): 2'-deoxy-2'-fluoro uridine
  misc_feature (20)..(21): n stands for thymidine
uucccagcugacucagaacnn

SEQ ID NO: 1187 - RNA, 21 nt, Artificial Sequence
  Description of Artificial Sequence:  siNA antisense region
  misc_feature (1)..(1): 5'-3 attached terminal deoxyabasic moeity
  misc_feature (21)..(21): 3'-3 attached terminal deoxyabasic moeity
  misc_feature (5)..(5): 2'-deoxy-2'-fluoro cytidine
  misc_feature (8)..(8): 2'-deoxy-2'-fluoro cytidine
  misc_feature (13)..(14): 2'-deoxy-2'-fluoro cytidine
  misc_feature (17)..(17): 2'-deoxy-2'-fluoro cytidine
  misc_feature (2)..(2): 2'-deoxy-2'-fluoro uridine
  misc_feature (4)..(4): 2'-deoxy-2'-fluoro uridine
  misc_feature (12)..(12): 2'-deoxy-2'-fluoro uridine
  misc_feature (18)..(19): 2'-deoxy-2'-fluoro uridine
  misc_feature (20)..(21): n stands for thymidine
augucaacagauccgacuunn

SEQ ID NO: 1188 - RNA, 21 nt, Artificial Sequence
  Description of Artificial Sequence:  siNA antisense region
  misc_feature (1)..(1): 5'-3 attached terminal deoxyabasic moeity
  misc_feature (21)..(21): 3'-3 attached terminal deoxyabasic moeity
  misc_feature (5)..(6): 2'-deoxy-2'-fluoro cytidine
  misc_feature (8)..(8): 2'-deoxy-2'-fluoro cytidine
  misc_feature (14)..(14): 2'-deoxy-2'-fluoro cytidine
  misc_feature (18)..(18): 2'-deoxy-2'-fluoro cytidine
  misc_feature (1)..(2): 2'-deoxy-2'-fluoro uridine
  misc_feature (7)..(7): 2'-deoxy-2'-fluoro uridine
  misc_feature (9)..(9): 2'-deoxy-2'-fluoro uridine
  misc_feature (12)..(12): 2'-deoxy-2'-fluoro uridine
  misc_feature (20)..(21): n stands for thymidine
uuggccucugauacagacann

SEQ ID NO: 1189 - RNA, 21 nt, Artificial Sequence
  Description of Artificial Sequence:  siNA antisense region
  misc_feature (3)..(3): 2'-deoxy-2'-fluoro cytidine
  misc_feature (12)..(13): 2'-deoxy-2'-fluoro cytidine
  misc_feature (17)..(17): 2'-deoxy-2'-fluoro cytidine
  misc_feature (5)..(5): 2'-deoxy-2'-fluoro uridine
  misc_feature (8)..(8): 2'-deoxy-2'-fluoro uridine
  misc_feature (10)..(11): 2'-deoxy-2'-fluoro uridine
  misc_feature (18)..(18): 2'-deoxy-2'-fluoro uridine
  misc_feature (20)..(20): Phosphorothioate 3'-Internucleotide Linkage
  misc_feature (20)..(21): n stands for thymidine
gacaugguguuccaagcugnn

SEQ ID NO: 1190 - RNA, 21 nt, Artificial Sequence
  Description of Artificial Sequence:  siNA antisense region
  misc_feature (4)..(4): 2'-deoxy-2'-fluoro cytidine
  misc_feature (10)..(10): 2'-deoxy-2'-fluoro cytidine
  misc_feature (13)..(13): 2'-deoxy-2'-fluoro cytidine
  misc_feature (2)..(3): 2'-deoxy-2'-fluoro uridine
  misc_feature (5)..(5): 2'-deoxy-2'-fluoro uridine
  misc_feature (9)..(9): 2'-deoxy-2'-fluoro uridine
  misc_feature (14)..(14): 2'-deoxy-2'-fluoro uridine
  misc_feature (20)..(20): Phosphorothioate 3'-Internucleotide Linkage
  misc_feature (20)..(21): n stands for thymidine
guucugagucagcugggaann

SEQ ID NO: 1191 - RNA, 21 nt, Artificial Sequence
  Description of Artificial Sequence:  siNA antisense region
  misc_feature (5)..(5): 2'-deoxy-2'-fluoro cytidine
  misc_feature (10)..(10): 2'-deoxy-2'-fluoro cytidine
  misc_feature (17)..(17): 2'-deoxy-2'-fluoro cytidine
  misc_feature (4)..(4): 2'-deoxy-2'-fluoro uridine
  misc_feature (9)..(9): 2'-deoxy-2'-fluoro uridine
  misc_feature (11)..(11): 2'-deoxy-2'-fluoro uridine
  misc_feature (13)..(14): 2'-deoxy-2'-fluoro uridine
  misc_feature (19)..(19): 2'-deoxy-2'-fluoro uridine
  misc_feature (20)..(20): Phosphorothioate 3'-Internucleotide Linkage
  misc_feature (20)..(21): n stands for thymidine
aagucggaucuguugacaunn

SEQ ID NO: 1192 - RNA, 21 nt, Artificial Sequence
  Description of Artificial Sequence:  siNA antisense region
  misc_feature (4)..(4): 2'-deoxy-2'-fluoro cytidine
  misc_feature (10)..(10): 2'-deoxy-2'-fluoro cytidine
  misc_feature (16)..(17): 2'-deoxy-2'-fluoro cytidine
  misc_feature (1)..(1): 2'-deoxy-2'-fluoro uridine
  misc_feature (3)..(3): 2'-deoxy-2'-fluoro uridine
  misc_feature (5)..(5): 2'-deoxy-2'-fluoro uridine
  misc_feature (7)..(7): 2'-deoxy-2'-fluoro uridine
  misc_feature (9)..(9): 2'-deoxy-2'-fluoro uridine
  misc_feature (20)..(20): Phosphorothioate 3'-Internucleotide Linkage
  misc_feature (20)..(21): n stands for thymidine
ugucuguaucagaggccaann

SEQ ID NO: 1193 - RNA, 21 nt, Artificial Sequence
  Description of Artificial Sequence:  siNA sense region
  misc_feature (1)..(1): 5'-3 attached terminal deoxyabasic moeity
  misc_feature (21)..(21): 3'-3 attached terminal deoxyabasic moeity
  misc_feature (1)..(1): 2'-deoxy-2'-fluoro cytidine
  misc_feature (4)..(4): 2'-deoxy-2'-fluoro cytidine
  misc_feature (11)..(11): 2'-deoxy-2'-fluoro cytidine
  misc_feature (13)..(14): 2'-deoxy-2'-fluoro cytidine
  misc_feature (19)..(19): 2'-deoxy-2'-fluoro cytidine
  misc_feature (5)..(6): 2'-deoxy-2'-fluoro uridine
  misc_feature (16)..(16): 2'-deoxy-2'-fluoro uridine
  misc_feature (18)..(18): 2'-deoxy-2'-fluoro uridine
  misc_feature (2)..(2): 2'-deoxy Adenosine
  misc_feature (9)..(10): 2'-deoxy Adenosine
  misc_feature (12)..(12): 2'-deoxy Adenosine
  misc_feature (15)..(15): 2'-deoxy Adenosine
  misc_feature (3)..(3): 2'-deoxy Guanosine
  misc_feature (7)..(8): 2'-deoxy Guanosine
  misc_feature (17)..(17): 2'-deoxy Guanosine
  misc_feature (20)..(21): n stands for thymidine
cagcuuggaacaccaugucnn

SEQ ID NO: 1194 - RNA, 21 nt, Artificial Sequence
  Description of Artificial Sequence:  siNA sense region
  misc_feature (1)..(1): 5'-3 attached terminal deoxyabasic moeity
  misc_feature (21)..(21): 3'-3 attached terminal deoxyabasic moeity
  misc_feature (3)..(5): 2'-deoxy-2'-fluoro cytidine
  misc_feature (8)..(8): 2'-deoxy-2'-fluoro cytidine
  misc_feature (12)..(12): 2'-deoxy-2'-fluoro cytidine
  misc_feature (14)..(14): 2'-deoxy-2'-fluoro cytidine
  misc_feature (19)..(19): 2'-deoxy-2'-fluoro cytidine
  misc_feature (1)..(2): 2'-deoxy-2'-fluoro uridine
  misc_feature (9)..(9): 2'-deoxy-2'-fluoro uridine
  misc_feature (13)..(13): 2'-deoxy-2'-fluoro uridine
  misc_feature (6)..(6): 2'-deoxy Adenosine
  misc_feature (11)..(11): 2'-deoxy Adenosine
  misc_feature (15)..(15): 2'-deoxy Adenosine
  misc_feature (17)..(18): 2'-deoxy Adenosine
  misc_feature (7)..(7): 2'-deoxy Guanosine
  misc_feature (10)..(10): 2'-deoxy Guanosine
  misc_feature (16)..(16): 2'-deoxy Guanosine
  misc_feature (20)..(21): n stands for thymidine
uucccagcugacucagaacnn

SEQ ID NO: 1195 - RNA, 21 nt, Artificial Sequence
  Description of Artificial Sequence:  siNA sense region
  misc_feature (1)..(1): 5'-3 attached terminal deoxyabasic moeity
  misc_feature (21)..(21): 3'-3 attached terminal deoxyabasic moeity
  misc_feature (5)..(5): 2'-deoxy-2'-fluoro cytidine
  misc_feature (8)..(8): 2'-deoxy-2'-fluoro cytidine
  misc_feature (13)..(14): 2'-deoxy-2'-fluoro cytidine
  misc_feature (17)..(17): 2'-deoxy-2'-fluoro cytidine
  misc_feature (2)..(2): 2'-deoxy-2'-fluoro uridine
  misc_feature (4)..(4): 2'-deoxy-2'-fluoro uridine
  misc_feature (12)..(12): 2'-deoxy-2'-fluoro uridine
  misc_feature (18)..(19): 2'-deoxy-2'-fluoro uridine
  misc_feature (1)..(1): 2'-deoxy Adenosine
  misc_feature (6)..(7): 2'-deoxy Adenosine
  misc_feature (9)..(9): 2'-deoxy Adenosine
  misc_feature (11)..(11): 2'-deoxy Adenosine
  misc_feature (16)..(16): 2'-deoxy Adenosine
  misc_feature (3)..(3): 2'-deoxy Guanosine
  misc_feature (10)..(10): 2'-deoxy Guanosine
  misc_feature (15)..(15): 2'-deoxy Guanosine
  misc_feature (20)..(21): n stands for thymidine
augucaacagauccgacuunn

SEQ ID NO: 1196 - RNA, 21 nt, Artificial Sequence
  Description of Artificial Sequence:  siNA sense region
  misc_feature (1)..(1): 5'-3 attached terminal deoxyabasic moeity
  misc_feature (21)..(21): 3'-3 attached terminal deoxyabasic moeity
  misc_feature (5)..(6): 2'-deoxy-2'-fluoro cytidine
  misc_feature (8)..(8): 2'-deoxy-2'-fluoro cytidine
  misc_feature (14)..(14): 2'-deoxy-2'-fluoro cytidine
  misc_feature (18)..(18): 2'-deoxy-2'-fluoro cytidine
  misc_feature (1)..(2): 2'-deoxy-2'-fluoro uridine
  misc_feature (7)..(7): 2'-deoxy-2'-fluoro uridine
  misc_feature (9)..(9): 2'-deoxy-2'-fluoro uridine
  misc_feature (12)..(12): 2'-deoxy-2'-fluoro uridine
  misc_feature (11)..(11): 2'-deoxy Adenosine
  misc_feature (13)..(13): 2'-deoxy Adenosine
  misc_feature (15)..(15): 2'-deoxy Adenosine
  misc_feature (17)..(17): 2'-deoxy Adenosine
  misc_feature (19)..(19): 2'-deoxy Adenosine
  misc_feature (3)..(4): 2'-deoxy Guanosine
  misc_feature (10)..(10): 2'-deoxy Guanosine
  misc_feature (16)..(16): 2'-deoxy Guanosine
  misc_feature (20)..(21): n stands for thymidine
uuggccucugauacagacann

SEQ ID NO: 1197 - RNA, 21 nt, Artificial Sequence
  Description of Artificial Sequence:  siNA antisense region
  misc_feature (3)..(3): 2'-deoxy-2'-fluoro cytidine
  misc_feature (12)..(13): 2'-deoxy-2'-fluoro cytidine
  misc_feature (17)..(17): 2'-deoxy-2'-fluoro cytidine
  misc_feature (5)..(5): 2'-deoxy-2'-fluoro uridine
  misc_feature (8)..(8): 2'-deoxy-2'-fluoro uridine
  misc_feature (10)..(11): 2'-deoxy-2'-fluoro uridine
  misc_feature (18)..(18): 2'-deoxy-2'-fluoro uridine
  misc_feature (2)..(2): 2'-deoxy Adenosine
  misc_feature (4)..(4): 2'-deoxy Adenosine
  misc_feature (14)..(15): 2'-deoxy Adenosine
  misc_feature (1)..(1): 2'-deoxy Guanosine
  misc_feature (6)..(7): 2'-deoxy Guanosine
  misc_feature (9)..(9): 2'-deoxy Guanosine
  misc_feature (16)..(16): 2'-deoxy Guanosine
  misc_feature (19)..(19): 2'-deoxy Guanosine
  misc_feature (20)..(20): Phosphorothioate 3'-Internucleotide Linkage
  misc_feature (20)..(21): n stands for thymidine
gacaugguguuccaagcugnn

SEQ ID NO: 1198 - RNA, 21 nt, Artificial Sequence
  Description of Artificial Sequence:  siNA antisense region
  misc_feature (4)..(4): 2'-deoxy-2'-fluoro cytidine
  misc_feature (10)..(10): 2'-deoxy-2'-fluoro cytidine
  misc_feature (13)..(13): 2'-deoxy-2'-fluoro cytidine
  misc_feature (2)..(3): 2'-deoxy-2'-fluoro uridine
  misc_feature (5)..(5): 2'-deoxy-2'-fluoro uridine
  misc_feature (9)..(9): 2'-deoxy-2'-fluoro uridine
  misc_feature (14)..(14): 2'-deoxy-2'-fluoro uridine
  misc_feature (7)..(7): 2'-deoxy Adenosine
  misc_feature (11)..(11): 2'-deoxy Adenosine
  misc_feature (18)..(19): 2'-deoxy Adenosine
  misc_feature (1)..(1): 2'-deoxy Guanosine
  misc_feature (6)..(6): 2'-deoxy Guanosine
  misc_feature (8)..(8): 2'-deoxy Guanosine
  misc_feature (12)..(12): 2'-deoxy Guanosine
  misc_feature (15)..(17): 2'-deoxy Guanosine
  misc_feature (20)..(20): Phosphorothioate 3'-Internucleotide Linkage
  misc_feature (20)..(21): n stands for thymidine
guucugagucagcugggaann

SEQ ID NO: 1199 - RNA, 21 nt, Artificial Sequence
  Description of Artificial Sequence:  siNA antisense region
  misc_feature (5)..(5): 2'-deoxy-2'-fluoro cytidine
  misc_feature (10)..(10): 2'-deoxy-2'-fluoro cytidine
  misc_feature (17)..(17): 2'-deoxy-2'-fluoro cytidine
  misc_feature (4)..(4): 2'-deoxy-2'-fluoro uridine
  misc_feature (9)..(9): 2'-deoxy-2'-fluoro uridine
  misc_feature (11)..(11): 2'-deoxy-2'-fluoro uridine
  misc_feature (13)..(14): 2'-deoxy-2'-fluoro uridine
  misc_feature (19)..(19): 2'-deoxy-2'-fluoro uridine
  misc_feature (1)..(2): 2'-deoxy Adenosine
  misc_feature (8)..(8): 2'-deoxy Adenosine
  misc_feature (16)..(16): 2'-deoxy Adenosine
  misc_feature (18)..(18): 2'-deoxy Adenosine
  misc_feature (3)..(3): 2'-deoxy Guanosine
  misc_feature (6)..(7): 2'-deoxy Guanosine
  misc_feature (12)..(12): 2'-deoxy Guanosine
  misc_feature (15)..(15): 2'-deoxy Guanosine
  misc_feature (20)..(20): Phosphorothioate 3'-Internucleotide Linkage
  misc_feature (20)..(21): n stands for thymidine
aagucggaucuguugacaunn

SEQ ID NO: 1200 - RNA, 21 nt, Artificial Sequence
  Description of Artificial Sequence:  siNA antisense region
  misc_feature (4)..(4): 2'-deoxy-2'-fluoro cytidine
  misc_feature (10)..(10): 2'-deoxy-2'-fluoro cytidine
  misc_feature (16)..(17): 2'-deoxy-2'-fluoro cytidine
  misc_feature (1)..(1): 2'-deoxy-2'-fluoro uridine
  misc_feature (3)..(3): 2'-deoxy-2'-fluoro uridine
  misc_feature (5)..(5): 2'-deoxy-2'-fluoro uridine
  misc_feature (7)..(7): 2'-deoxy-2'-fluoro uridine
  misc_feature (9)..(9): 2'-deoxy-2'-fluoro uridine
  misc_feature (8)..(8): 2'-deoxy Adenosine
  misc_feature (11)..(11): 2'-deoxy Adenosine
  misc_feature (13)..(13): 2'-deoxy Adenosine
  misc_feature (18)..(19): 2'-deoxy Adenosine
  misc_feature (2)..(2): 2'-deoxy Guanosine
  misc_feature (6)..(6): 2'-deoxy Guanosine
  misc_feature (12)..(12): 2'-deoxy Guanosine
  misc_feature (14)..(15): 2'-deoxy Guanosine
  misc_feature (20)..(20): Phosphorothioate 3'-Internucleotide Linkage
  misc_feature (20)..(21): n stands for thymidine
ugucuguaucagaggccaann

SEQ ID NO: 1201 - RNA, 21 nt, Artificial Sequence
  Description of Artificial Sequence:  siNA sense region
  misc_feature (20)..(21): n stands for thymidine
cuacuuugcucaguaccacnn

SEQ ID NO: 1202 - RNA, 21 nt, Artificial Sequence
  Description of Artificial Sequence:  siNA sense region
  misc_feature (20)..(21): n stands for thymidine
ucugucuuugugggagggunn

SEQ ID NO: 1203 - RNA, 21 nt, Artificial Sequence
  Description of Artificial Sequence:  siNA sense region
  misc_feature (20)..(21): n stands for thymidine
aagggucuucuuggcagcunn

SEQ ID NO: 1204 - RNA, 21 nt, Artificial Sequence
  Description of Artificial Sequence:  siNA sense region
  misc_feature (20)..(21): n stands for thymidine
acucuaagcuggagcucuunn

SEQ ID NO: 1205 - RNA, 21 nt, Artificial Sequence
  Description of Artificial Sequence:  siNA antisense region
  misc_feature (20)..(21): n stands for thymidine
gugguacugagcaaaguagnn

SEQ ID NO: 1206 - RNA, 21 nt, Artificial Sequence
  Description of Artificial Sequence:  siNA antisense region
  misc_feature (20)..(21): n stands for thymidine
acccucccacaaagacagann

SEQ ID NO: 1207 - RNA, 21 nt, Artificial Sequence
  Description of Artificial Sequence:  siNA antisense region
  misc_feature (20)..(21): n stands for thymidine
agcugccaagaagacccuunn

SEQ ID NO: 1208 - RNA, 21 nt, Artificial Sequence
  Description of Artificial Sequence:  siNA antisense region
  misc_feature (20)..(21): n stands for thymidine
aagagcuccagcuuagagunn

SEQ ID NO: 1209 - RNA, 21 nt, Artificial Sequence
  Description of Artificial Sequence:  siNA sense region
  misc_feature (1)..(1): 5'-3 attached terminal deoxyabasic moeity
  misc_feature (21)..(21): 3'-3 attached terminal deoxyabasic moeity
  misc_feature (1)..(1): 2'-deoxy-2'-fluoro cytidine
  misc_feature (4)..(4): 2'-deoxy-2'-fluoro cytidine
  misc_feature (9)..(9): 2'-deoxy-2'-fluoro cytidine
  misc_feature (11)..(11): 2'-deoxy-2'-fluoro cytidine
  misc_feature (16)..(17): 2'-deoxy-2'-fluoro cytidine
  misc_feature (19)..(19): 2'-deoxy-2'-fluoro cytidine
  misc_feature (2)..(2): 2'-deoxy-2'-fluoro uridine
  misc_feature (5)..(7): 2'-deoxy-2'-fluoro uridine
  misc_feature (10)..(10): 2'-deoxy-2'-fluoro uridine
  misc_feature (14)..(14): 2'-deoxy-2'-fluoro uridine
  misc_feature (20)..(21): n stands for thymidine
cuacuuugcucaguaccacnn

SEQ ID NO: 1210 - RNA, 21 nt, Artificial Sequence
  Description of Artificial Sequence:  siNA sense region
  misc_feature (1)..(1): 5'-3 attached terminal deoxyabasic moeity
  misc_feature (21)..(21): 3'-3 attached terminal deoxyabasic moeity
  misc_feature (2)..(2): 2'-deoxy-2'-fluoro cytidine
  misc_feature (6)..(6): 2'-deoxy-2'-fluoro cytidine
  misc_feature (1)..(1): 2'-deoxy-2'-fluoro uridine
  misc_feature (3)..(3): 2'-deoxy-2'-fluoro uridine
  misc_feature (5)..(5): 2'-deoxy-2'-fluoro uridine
  misc_feature (7)..(9): 2'-deoxy-2'-fluoro uridine
  misc_feature (11)..(11): 2'-deoxy-2'-fluoro uridine
  misc_feature (19)..(19): 2'-deoxy-2'-fluoro uridine
  misc_feature (20)..(21): n stands for thymidine
ucugucuuugugggagggunn

SEQ ID NO: 1211 - RNA, 21 nt, Artificial Sequence
  Description of Artificial Sequence:  siNA sense region
  misc_feature (1)..(1): 5'-3 attached terminal deoxyabasic moeity
  misc_feature (21)..(21): 3'-3 attached terminal deoxyabasic moeity
  misc_feature (7)..(7): 2'-deoxy-2'-fluoro cytidine
  misc_feature (10)..(10): 2'-deoxy-2'-fluoro cytidine
  misc_feature (15)..(15): 2'-deoxy-2'-fluoro cytidine
  misc_feature (18)..(18): 2'-deoxy-2'-fluoro cytidine
  misc_feature (6)..(6): 2'-deoxy-2'-fluoro uridine
  misc_feature (8)..(9): 2'-deoxy-2'-fluoro uridine
  misc_feature (11)..(12): 2'-deoxy-2'-fluoro uridine
  misc_feature (19)..(19): 2'-deoxy-2'-fluoro uridine
  misc_feature (20)..(21): n stands for thymidine
aagggucuucuuggcagcunn

SEQ ID NO: 1212 - RNA, 21 nt, Artificial Sequence
  Description of Artificial Sequence:  siNA sense region
  misc_feature (1)..(1): 5'-3 attached terminal deoxyabasic moeity
  misc_feature (21)..(21): 3'-3 attached terminal deoxyabasic moeity
  misc_feature (2)..(2): 2'-deoxy-2'-fluoro cytidine
  misc_feature (4)..(4): 2'-deoxy-2'-fluoro cytidine
  misc_feature (9)..(9): 2'-deoxy-2'-fluoro cytidine
  misc_feature (15)..(15): 2'-deoxy-2'-fluoro cytidine
  misc_feature (17)..(17): 2'-deoxy-2'-fluoro cytidine
  misc_feature (3)..(3): 2'-deoxy-2'-fluoro uridine
  misc_feature (5)..(5): 2'-deoxy-2'-fluoro uridine
  misc_feature (10)..(10): 2'-deoxy-2'-fluoro uridine
  misc_feature (16)..(16): 2'-deoxy-2'-fluoro uridine
  misc_feature (18)..(19): 2'-deoxy-2'-fluoro uridine
  misc_feature (20)..(21): n stands for thymidine
acucuaagcuggagcucuunn

SEQ ID NO: 1213 - RNA, 21 nt, Artificial Sequence
  Description of Artificial Sequence:  siNA antisense region
  misc_feature (7)..(7): 2'-deoxy-2'-fluoro cytidine
  misc_feature (12)..(12): 2'-deoxy-2'-fluoro cytidine
  misc_feature (2)..(2): 2'-deoxy-2'-fluoro uridine
  misc_feature (5)..(5): 2'-deoxy-2'-fluoro uridine
  misc_feature (8)..(8): 2'-deoxy-2'-fluoro uridine
  misc_feature (17)..(17): 2'-deoxy-2'-fluoro uridine
  misc_feature (20)..(20): Phosphorothioate 3'-Internucleotide Linkage
  misc_feature (20)..(21): n stands for thymidine
gugguacugagcaaaguagnn

SEQ ID NO: 1214 - RNA, 21 nt, Artificial Sequence
  Description of Artificial Sequence:  siNA antisense region
  misc_feature (2)..(4): 2'-deoxy-2'-fluoro cytidine
  misc_feature (6)..(8): 2'-deoxy-2'-fluoro cytidine
  misc_feature (10)..(10): 2'-deoxy-2'-fluoro cytidine
  misc_feature (14)..(14): 2'-deoxy-2'-fluoro cytidine
  misc_feature (5)..(5): 2'-deoxy-2'-fluoro uridine
  misc_feature (20)..(20): Phosphorothioate 3'-Internucleotide Linkage
  misc_feature (20)..(21): n stands for thymidine
acccucccacaaagacagann

SEQ ID NO: 1215 - RNA, 21 nt, Artificial Sequence
  Description of Artificial Sequence:  siNA antisense region
  misc_feature (3)..(3): 2'-deoxy-2'-fluoro cytidine
  misc_feature (6)..(7): 2'-deoxy-2'-fluoro cytidine
  misc_feature (15)..(17): 2'-deoxy-2'-fluoro cytidine
  misc_feature (4)..(4): 2'-deoxy-2'-fluoro uridine
  misc_feature (18)..(19): 2'-deoxy-2'-fluoro uridine
  misc_feature (20)..(20): Phosphorothioate 3'-Internucleotide Linkage
  misc_feature (20)..(21): n stands for thymidine
agcugccaagaagacccuunn

SEQ ID NO: 1216 - RNA, 21 nt, Artificial Sequence
  Description of Artificial Sequence:  siNA antisense region
  misc_feature (6)..(6): 2'-deoxy-2'-fluoro cytidine
  misc_feature (8)..(9): 2'-deoxy-2'-fluoro cytidine
  misc_feature (12)..(12): 2'-deoxy-2'-fluoro cytidine
  misc_feature (7)..(7): 2'-deoxy-2'-fluoro uridine
  misc_feature (13)..(14): 2'-deoxy-2'-fluoro uridine
  misc_feature (19)..(19): 2'-deoxy-2'-fluoro uridine
  misc_feature (20)..(20): Phosphorothioate 3'-Internucleotide Linkage
  misc_feature (20)..(21): n stands for thymidine
aagagcuccagcuuagagunn

SEQ ID NO: 1217 - RNA, 21 nt, Artificial Sequence
  Description of Artificial Sequence:  siNA sense region
  misc_feature (1)..(1): 5'-3 attached terminal deoxyabasic moeity
  misc_feature (21)..(21): 3'-3 attached terminal deoxyabasic moeity
  misc_feature (1)..(1): 2'-deoxy-2'-fluoro cytidine
  misc_feature (4)..(4): 2'-deoxy-2'-fluoro cytidine
  misc_feature (9)..(9): 2'-deoxy-2'-fluoro cytidine
  misc_feature (11)..(11): 2'-deoxy-2'-fluoro cytidine
  misc_feature (16)..(17): 2'-deoxy-2'-fluoro cytidine
  misc_feature (19)..(19): 2'-deoxy-2'-fluoro cytidine
  misc_feature (2)..(2): 2'-deoxy-2'-fluoro uridine
  misc_feature (5)..(7): 2'-deoxy-2'-fluoro uridine
  misc_feature (10)..(10): 2'-deoxy-2'-fluoro uridine
  misc_feature (14)..(14): 2'-deoxy-2'-fluoro uridine
  misc_feature (3)..(3): 2'-deoxy Adenosine
  misc_feature (12)..(12): 2'-deoxy Adenosine
  misc_feature (15)..(15): 2'-deoxy Adenosine
  misc_feature (18)..(18): 2'-deoxy Adenosine
  misc_feature (8)..(8): 2'-deoxy Guanosine
  misc_feature (13)..(13): 2'-deoxy Guanosine
  misc_feature (20)..(21): n stands for thymidine
cuacuuugcucaguaccacnn

SEQ ID NO: 1218 - RNA, 21 nt, Artificial Sequence
  Description of Artificial Sequence:  siNA sense region
  misc_feature (1)..(1): 5'-3 attached terminal deoxyabasic moeity
  misc_feature (21)..(21): 3'-3 attached terminal deoxyabasic moeity
  misc_feature (2)..(2): 2'-deoxy-2'-fluoro cytidine
  misc_feature (6)..(6): 2'-deoxy-2'-fluoro cytidine
  misc_feature (1)..(1): 2'-deoxy-2'-fluoro uridine
  misc_feature (3)..(3): 2'-deoxy-2'-fluoro uridine
  misc_feature (5)..(5): 2'-deoxy-2'-fluoro uridine
  misc_feature (7)..(9): 2'-deoxy-2'-fluoro uridine
  misc_feature (11)..(11): 2'-deoxy-2'-fluoro uridine
  misc_feature (19)..(19): 2'-deoxy-2'-fluoro uridine
  misc_feature (15)..(15): 2'-deoxy Adenosine
  misc_feature (4)..(4): 2'-deoxy Guanosine
  misc_feature (10)..(10): 2'-deoxy Guanosine
  misc_feature (12)..(14): 2'-deoxy Guanosine
  misc_feature (16)..(18): 2'-deoxy Guanosine
  misc_feature (20)..(21): n stands for thymidine
ucugucuuugugggagggunn

SEQ ID NO: 1219 - RNA, 21 nt, Artificial Sequence
  Description of Artificial Sequence:  siNA sense region
  misc_feature (1)..(1): 5'-3 attached terminal deoxyabasic moeity
  misc_feature (21)..(21): 3'-3 attached terminal deoxyabasic moeity
  misc_feature (7)..(7): 2'-deoxy-2'-fluoro cytidine
  misc_feature (10)..(10): 2'-deoxy-2'-fluoro cytidine
  misc_feature (15)..(15): 2'-deoxy-2'-fluoro cytidine
  misc_feature (18)..(18): 2'-deoxy-2'-fluoro cytidine
  misc_feature (6)..(6): 2'-deoxy-2'-fluoro uridine
  misc_feature (8)..(9): 2'-deoxy-2'-fluoro uridine
  misc_feature (11)..(12): 2'-deoxy-2'-fluoro uridine
  misc_feature (19)..(19): 2'-deoxy-2'-fluoro uridine
  misc_feature (1)..(2): 2'-deoxy Adenosine
  misc_feature (16)..(16): 2'-deoxy Adenosine
  misc_feature (3)..(5): 2'-deoxy Guanosine
  misc_feature (13)..(14): 2'-deoxy Guanosine
  misc_feature (17)..(17): 2'-deoxy Guanosine
  misc_feature (20)..(21): n stands for thymidine
aagggucuucuuggcagcunn

SEQ ID NO: 1220 - RNA, 21 nt, Artificial Sequence
  Description of Artificial Sequence:  siNA sense region
  misc_feature (1)..(1): 5'-3 attached terminal deoxyabasic moeity
  misc_feature (21)..(21): 3'-3 attached terminal deoxyabasic moeity
  misc_feature (2)..(2): 2'-deoxy-2'-fluoro cytidine
  misc_feature (4)..(4): 2'-deoxy-2'-fluoro cytidine
  misc_feature (9)..(9): 2'-deoxy-2'-fluoro cytidine
  misc_feature (15)..(15): 2'-deoxy-2'-fluoro cytidine
  misc_feature (17)..(17): 2'-deoxy-2'-fluoro cytidine
  misc_feature (3)..(3): 2'-deoxy-2'-fluoro uridine
  misc_feature (5)..(5): 2'-deoxy-2'-fluoro uridine
  misc_feature (10)..(10): 2'-deoxy-2'-fluoro uridine
  misc_feature (16)..(16): 2'-deoxy-2'-fluoro uridine
  misc_feature (18)..(19): 2'-deoxy-2'-fluoro uridine
  misc_feature (1)..(1): 2'-deoxy Adenosine
  misc_feature (6)..(7): 2'-deoxy Adenosine
  misc_feature (13)..(13): 2'-deoxy Adenosine
  misc_feature (8)..(8): 2'-deoxy Guanosine
  misc_feature (11)..(12): 2'-deoxy Guanosine
  misc_feature (14)..(14): 2'-deoxy Guanosine
  misc_feature (20)..(21): n stands for thymidine
acucuaagcuggagcucuunn

SEQ ID NO: 1221 - RNA, 21 nt, Artificial Sequence
  Description of Artificial Sequence:  siNA antisense region
  misc_feature (7)..(7): 2'-deoxy-2'-fluoro cytidine
  misc_feature (12)..(12): 2'-deoxy-2'-fluoro cytidine
  misc_feature (2)..(2): 2'-deoxy-2'-fluoro uridine
  misc_feature (5)..(5): 2'-deoxy-2'-fluoro uridine
  misc_feature (8)..(8): 2'-deoxy-2'-fluoro uridine
  misc_feature (17)..(17): 2'-deoxy-2'-fluoro uridine
  misc_feature (6)..(6): 2'-deoxy Adenosine
  misc_feature (10)..(10): 2'-deoxy Adenosine
  misc_feature (13)..(15): 2'-deoxy Adenosine
  misc_feature (18)..(18): 2'-deoxy Adenosine
  misc_feature (1)..(1): 2'-deoxy Guanosine
  misc_feature (3)..(4): 2'-deoxy Guanosine
  misc_feature (9)..(9): 2'-deoxy Guanosine
  misc_feature (11)..(11): 2'-deoxy Guanosine
  misc_feature (16)..(16): 2'-deoxy Guanosine
  misc_feature (19)..(19): 2'-deoxy Guanosine
  misc_feature (20)..(20): Phosphorothioate 3'-Internucleotide Linkage
  misc_feature (20)..(21): n stands for thymidine
gugguacugagcaaaguagnn

SEQ ID NO: 1222 - RNA, 21 nt, Artificial Sequence
  Description of Artificial Sequence:  siNA antisense region
  misc_feature (2)..(4): 2'-deoxy-2'-fluoro cytidine
  misc_feature (6)..(8): 2'-deoxy-2'-fluoro cytidine
  misc_feature (10)..(10): 2'-deoxy-2'-fluoro cytidine
  misc_feature (16)..(16): 2'-deoxy-2'-fluoro cytidine
  misc_feature (5)..(5): 2'-deoxy-2'-fluoro uridine
  misc_feature (1)..(1): 2'-deoxy Adenosine
  misc_feature (9)..(9): 2'-deoxy Adenosine
  misc_feature (11)..(13): 2'-deoxy Adenosine
  misc_feature (15)..(15): 2'-deoxy Adenosine
  misc_feature (17)..(17): 2'-deoxy Adenosine
  misc_feature (19)..(19): 2'-deoxy Adenosine
  misc_feature (14)..(14): 2'-deoxy Guanosine
  misc_feature (18)..(18): 2'-deoxy Guanosine
  misc_feature (20)..(20): Phosphorothioate 3'-Internucleotide Linkage
  misc_feature (20)..(21): n stands for thymidine
acccucccacaaagacagann

SEQ ID NO: 1223 - RNA, 21 nt, Artificial Sequence
  Description of Artificial Sequence:  siNA antisense region
  misc_feature (3)..(3): 2'-deoxy-2'-fluoro cytidine
  misc_feature (6)..(7): 2'-deoxy-2'-fluoro cytidine
  misc_feature (15)..(17): 2'-deoxy-2'-fluoro cytidine
  misc_feature (4)..(4): 2'-deoxy-2'-fluoro uridine
  misc_feature (18)..(19): 2'-deoxy-2'-fluoro uridine
  misc_feature (1)..(1): 2'-deoxy Adenosine
  misc_feature (8)..(9): 2'-deoxy Adenosine
  misc_feature (11)..(12): 2'-deoxy Adenosine
  misc_feature (14)..(14): 2'-deoxy Adenosine
  misc_feature (2)..(2): 2'-deoxy Guanosine
  misc_feature (5)..(5): 2'-deoxy Guanosine
  misc_feature (10)..(10): 2'-deoxy Guanosine
  misc_feature (13)..(13): 2'-deoxy Guanosine
  misc_feature (20)..(20): Phosphorothioate 3'-Internucleotide Linkage
  misc_feature (20)..(21): n stands for thymidine
agcugccaagaagacccuunn

SEQ ID NO: 1224 - RNA, 21 nt, Artificial Sequence
  Description of Artificial Sequence:  siNA antisense region
  misc_feature (6)..(6): 2'-deoxy-2'-fluoro cytidine
  misc_feature (8)..(9): 2'-deoxy-2'-fluoro cytidine
  misc_feature (12)..(12): 2'-deoxy-2'-fluoro cytidine
  misc_feature (7)..(7): 2'-deoxy-2'-fluoro uridine
  misc_feature (13)..(14): 2'-deoxy-2'-fluoro uridine
  misc_feature (19)..(19): 2'-deoxy-2'-fluoro uridine
  misc_feature (1)..(2): 2'-deoxy Adenosine
  misc_feature (4)..(4): 2'-deoxy Adenosine
  misc_feature (10)..(10): 2'-deoxy Adenosine
  misc_feature (15)..(15): 2'-deoxy Adenosine
  misc_feature (17)..(17): 2'-deoxy Adenosine
  misc_feature (3)..(3): 2'-deoxy Guanosine
  misc_feature (5)..(5): 2'-deoxy Guanosine
  misc_feature (11)..(11): 2'-deoxy Guanosine
  misc_feature (16)..(16): 2'-deoxy Guanosine
  misc_feature (18)..(18): 2'-deoxy Guanosine
  misc_feature (20)..(20): Phosphorothioate 3'-Internucleotide Linkage
  misc_feature (20)..(21): n stands for thymidine
aagagcuccagcuuagagunn

SEQ ID NO: 1225 - RNA, 21 nt, Artificial Sequence
  Description of Artificial Sequence:  siNA sense region
  misc_feature (1)..(4): Phosphorothioate 3'-Internucleotide Linkage
  misc_feature (17)..(20): Phosphorothioate 3'-Internucleotide Linkage
  misc_feature (1)..(19): n stands for any nucleotide wherein any pyrimidine nucleotide present is 2'-O-methyl or 2'-Fluoro
  misc_feature (20)..(21): n stands for any nucleotide
nnnnnnnnnnnnnnnnnnnnn

SEQ ID NO: 1226 - RNA, 21 nt, Artificial Sequence
  Description of Artificial Sequence:  siNA antisense region
  misc_feature (1)..(4): Phosphorothioate 3'-Internucleotide Linkage
  misc_feature (20)..(20): Phosphorothioate 3'-Internucleotide Linkage
  misc_feature (1)..(19): n stands for any nucleotide wherein any pyrimidine nucleotide present is 2'-Fluoro
  misc_feature (20)..(21): n stands for any nucleotide
  misc_feature (21)..(21): 3'-3 attached terminal glyceryl moeity
nnnnnnnnnnnnnnnnnnnnn

SEQ ID NO: 1227 - RNA, 21 nt, Artificial Sequence
  Description of Artificial Sequence:  siNA sense region
  misc_feature (1)..(19): n stands for any nucleotide wherein any pyrimidine nucleotide present is 2'-O-methyl or 2'-Fluoro
  misc_feature (20)..(21): n stands for any nucleotide
nnnnnnnnnnnnnnnnnnnnn

SEQ ID NO: 1228 - RNA, 21 nt, Artificial Sequence
  Description of Artificial Sequence:  siNA antisense region
  misc_feature (1)..(19): n stands for any nucleotide wherein any pyrimidine nucleotide present is 2'-Fluoro
  misc_feature (20)..(21): n stands for any nucleotide
  misc_feature (21)..(21): 3'-3 attached terminal glyceryl moeity
nnnnnnnnnnnnnnnnnnnnn

SEQ ID NO: 1229 - RNA, 21 nt, Artificial Sequence
  Description of Artificial Sequence:  siNA sense region
  misc_feature (1)..(19): n stands for any nucleotide wherein any pyrimidine nucleotide present is 2'-O-methyl or 2'-Fluoro
  misc_feature (20)..(21): n stands for any nucleotide
  misc_feature (1)..(1): 5'-3 attached terminal deoxyabasic moeity
  misc_feature (21)..(21): 3'-3 attached terminal deoxyabasic moeity
nnnnnnnnnnnnnnnnnnnnn

SEQ ID NO: 1230 - RNA, 21 nt, Artificial Sequence
  Description of Artificial Sequence:  siNA antisense region
  misc_feature (1)..(19): n stands for any nucleotide wherein any pyrimidine nucleotide present is 2'-Fluoro
  misc_feature (20)..(20): Phosphorothioate 3'-Internucleotide Linkage
  misc_feature (20)..(21): n stands for any nucleotide
  misc_feature (21)..(21): 3'-3 attached terminal glyceryl moeity
nnnnnnnnnnnnnnnnnnnnn

SEQ ID NO: 1231 - RNA, 21 nt, Artificial Sequence
  Description of Artificial Sequence:  siNA sense region
  misc_feature (1)..(19): n stands for any nucleotide wherein any pyrimidine nucleotide present is 2'-Fluoro and any purine nucleotide present is 2'-Deoxy
  misc_feature (20)..(21): n stands for any nucleotide
  misc_feature (1)..(1): 5'-3 attached terminal deoxyabasic moeity
  misc_feature (21)..(21): 3'-3 attached terminal deoxyabasic moeity
nnnnnnnnnnnnnnnnnnnnn

SEQ ID NO: 1232 - RNA, 21 nt, Artificial Sequence
  Description of Artificial Sequence:  siNA antisense region
  misc_feature (1)..(19): n stands for any nucleotide wherein any pyrimidine nucleotide present is 2'-Fluoro and any purine nucleotide present is 2'-O-methyl
  misc_feature (20)..(20): Phosphorothioate 3'-Internucleotide Linkage
  misc_feature (20)..(21): n stands for any nucleotide
  misc_feature (21)..(21): 3'-3 attached terminal glyceryl moeity
nnnnnnnnnnnnnnnnnnnnn

SEQ ID NO: 1233 - RNA, 21 nt, Artificial Sequence
  Description of Artificial Sequence:  siNA sense region
  misc_feature (1)..(19): n stands for any nucleotide wherein any pyrimidine nucleotide present is 2'-Fluoro
  misc_feature (20)..(21): n stands for any nucleotide
  misc_feature (1)..(1): 5'-3 attached terminal deoxyabasic moeity
  misc_feature (21)..(21): 3'-3 attached terminal deoxyabasic moeity
nnnnnnnnnnnnnnnnnnnnn

SEQ ID NO: 1234 - RNA, 21 nt, Artificial Sequence
  Description of Artificial Sequence:  siNA antisense region
  misc_feature (1)..(19): n stands for any nucleotide wherein any pyrimidine nucleotide present is 2'-Fluoro and any purine nucleotide present is 2'-O-methyl
  misc_feature (20)..(21): n stands for any nucleotide
  misc_feature (21)..(21): 3'-3 attached terminal glyceryl moeity
nnnnnnnnnnnnnnnnnnnnn

SEQ ID NO: 1235 - RNA, 21 nt, Artificial Sequence
  Description of Artificial Sequence:  siNA antisense region
  misc_feature (1)..(19): n stands for any nucleotide wherein any pyrimidine nucleotide present is 2'-Fluoro and any purine nucleotide present is 2'-Deoxy
  misc_feature (20)..(20): Phosphorothioate 3'-Internucleotide Linkage
  misc_feature (20)..(21): n stands for any nucleotide
  misc_feature (21)..(21): 3'-3 attached terminal glyceryl moeity
nnnnnnnnnnnnnnnnnnnnn

SEQ ID NO: 1236 - RNA, 21 nt, Artificial Sequence
  Description of Artificial Sequence:  siNA sense region
  misc_feature (1)..(4): Phosphorothioate or Phosphorodithioate 3'-Internucleotide Linkage
  misc_feature (17)..(20): Phosphorothioate or Phosphorodithioate 3'-Internucleotide Linkage
  misc_feature (1)..(5): 2'-O-Methyl or 2'-deoxy-2'Fluoro
  misc_feature (7)..(9): 2'-O-Methyl or 2'-deoxy-2'Fluoro
  misc_feature (11)..(11): 2'-O-Methyl or 2'-deoxy-2'Fluoro
  misc_feature (16)..(19): 2'-O-Methyl or 2'-deoxy-2'Fluoro
  misc_feature (20)..(21): n stands for thymidine
uccuugccuaugaggccucnn

SEQ ID NO: 1237 - RNA, 21 nt, Artificial Sequence
  Description of Artificial Sequence:  siNA antisense region
  misc_feature (1)..(4): Phosphorothioate or Phosphorodithioate 3'-Internucleotide Linkage
  misc_feature (20)..(20): Phosphorothioate or Phosphorodithioate 3'-Internucleotide Linkage
  misc_feature (5)..(8): 2'-deoxy-2'-Fluoro
  misc_feature (10)..(10): 2'-deoxy-2'-Fluoro
  misc_feature (14)..(14): 2'-deoxy-2'-Fluoro
  misc_feature (20)..(21): n stands for thymidine
  misc_feature (21)..(21): 3'-3 attached terminal glyceryl moeity
gaggccucauaggcaaggann

SEQ ID NO: 1238 - RNA, 21 nt, Artificial Sequence
  Description of Artificial Sequence:  siNA sense region
  misc_feature (1)..(5): 2'-O-Methyl or 2'-deoxy-2'-Fluoro
  misc_feature (7)..(9): 2'-O-Methyl or 2'-deoxy-2'-Fluoro
  misc_feature (11)..(11): 2'-O-Methyl or 2'-deoxy-2'-Fluoro
  misc_feature (16)..(19): 2'-O-Methyl or 2'-deoxy-2'-Fluoro
  misc_feature (20)..(21): n stands for thymidine
uccuugccuaugaggccucnn

SEQ ID NO: 1239 - RNA, 21 nt, Artificial Sequence
  Description of Artificial Sequence:  siNA antisense region
  misc_feature (5)..(8): 2'-deoxy-2'-Fluoro
  misc_feature (10)..(10): 2'-deoxy-2'-Fluoro
  misc_feature (14)..(14): 2'-deoxy-2'-Fluoro
  misc_feature (20)..(21): n stands for thymidine
  misc_feature (21)..(21): 3'-3 attached terminal glyceryl moeity
gaugaggcauagcagcaggnn

SEQ ID NO: 1240 - RNA, 21 nt, Artificial Sequence
  Description of Artificial Sequence:  siNA sense region
  misc_feature (1)..(5): 2'-O-Methyl or 2'-deoxy-2'-Fluoro
  misc_feature (7)..(9): 2'-O-Methyl or 2'-deoxy-2'-Fluoro
  misc_feature (11)..(11): 2'-O-Methyl or 2'-deoxy-2'-Fluoro
  misc_feature (16)..(19): 2'-O-Methyl or 2'-deoxy-2'-Fluoro
  misc_feature (1)..(1): 5'-3 attached terminal deoxyabasic moeity
  misc_feature (21)..(21): 3'-3 attached terminal deoxyabasic moeity
  misc_feature (20)..(21): n stands for thymidine
uccuugccuaugaggccucnn

SEQ ID NO: 1241 - RNA, 21 nt, Artificial Sequence
  Description of Artificial Sequence:  siNA antisense region
  misc_feature (5)..(8): 2'-deoxy-2'-Fluoro
  misc_feature (10)..(10): 2'-deoxy-2'-Fluoro
  misc_feature (14)..(14): 2'-deoxy-2'-Fluoro
  misc_feature (16)..(16): 2'-deoxy-2'-Fluoro
  misc_feature (20)..(20): Phosphorothioate 3'-Internucleotide Linkage
  misc_feature (20)..(21): n stands for thymidine
  misc_feature (21)..(21): 3'-3 attached terminal glyceryl moeity
gaggccucauaggcaaggann

SEQ ID NO: 1242 - RNA, 21 nt, Artificial Sequence
  Description of Artificial Sequence:  siNA sense region
  misc_feature (1)..(5): 2'-deoxy-2'-Fluoro
  misc_feature (7)..(9): 2'-deoxy-2'-Fluoro
  misc_feature (11)..(11): 2'-deoxy-2'-Fluoro
  misc_feature (16)..(19): 2'-deoxy-2'-Fluoro
  misc_feature (10)..(10): 2'-deoxy Adenosine
  misc_feature (13)..(13): 2'-deoxy Adenosine
  misc_feature (6)..(6): 2'-deoxy Guanosine
  misc_feature (12)..(12): 2'-deoxy Guanosine
  misc_feature (14)..(15): 2'-deoxy Guanosine
  misc_feature (1)..(1): 5'-3 attached terminal deoxyabasic moeity
  misc_feature (21)..(21): 3'-3 attached terminal deoxyabasic moeity
  misc_feature (20)..(21): n stands for thymidine
uccuugccuaugaggccucnn

SEQ ID NO: 1243 - RNA, 21 nt, Artificial Sequence
  Description of Artificial Sequence:  siNA antisense region
  misc_feature (1)..(4): 2'-O-Methyl
  misc_feature (9)..(9): 2'-O-Methyl
  misc_feature (11)..(13): 2'-O-Methyl
  misc_feature (15)..(19): 2'-O-Methyl
  misc_feature (5)..(8): 2'-deoxy-2'-Fluoro
  misc_feature (10)..(10): 2'-deoxy-2'-Fluoro
  misc_feature (14)..(14): 2'-deoxy-2'-Fluoro
  misc_feature (20)..(20): Phosphorothioate or Phosphorodithioate 3'-Internucleotide Linkage
  misc_feature (20)..(21): n stands for thymidine
  misc_feature (21)..(21): 3'-3 attached terminal glyceryl moeity
gaggccucauaggcaaggann

SEQ ID NO: 1244 - RNA, 21 nt, Artificial Sequence
  Description of Artificial Sequence:  siNA sense region
  misc_feature (1)..(5): 2'-deoxy-2'-Fluoro
  misc_feature (7)..(9): 2'-deoxy-2'-Fluoro
  misc_feature (11)..(11): 2'-deoxy-2'-Fluoro
  misc_feature (16)..(19): 2'-deoxy-2'-Fluoro
  misc_feature (1)..(1): 5'-3 attached terminal deoxyabasic moeity
  misc_feature (21)..(21): 3'-3 attached terminal deoxyabasic moeity
  misc_feature (20)..(21): n stands for thymidine
uccuugccuaugaggccucnn

SEQ ID NO: 1245 - RNA, 21 nt, Artificial Sequence
  Description of Artificial Sequence:  siNA antisense region
  misc_feature (1)..(4): 2'-O-Methyl
  misc_feature (9)..(9): 2'-O-Methyl
  misc_feature (11)..(13): 2'-O-Methyl
  misc_feature (15)..(19): 2'-O-Methyl
  misc_feature (5)..(8): 2'-deoxy-2'-Fluoro
  misc_feature (10)..(10): 2'-deoxy-2'-Fluoro
  misc_feature (14)..(14): 2'-deoxy-2'-Fluoro
  misc_feature (20)..(21): n stands for thymidine
  misc_feature (21)..(21): 3'-3 attached terminal glyceryl moeity
gaggccucauaggcaaggann

SEQ ID NO: 1246 - RNA, 21 nt, Artificial Sequence
  Description of Artificial Sequence:  siNA antisense region
  misc_feature (5)..(8): 2'-deoxy-2'-Fluoro
  misc_feature (10)..(10): 2'-deoxy-2'-Fluoro
  misc_feature (14)..(14): 2'-deoxy-2'-Fluoro
  misc_feature (2)..(2): 2'-deoxy Adenosine
  misc_feature (9)..(9): 2'-deoxy Adenosine
  misc_feature (11)..(11): 2'-deoxy Adenosine
  misc_feature (15)..(16): 2'-deoxy Adenosine
  misc_feature (19)..(19): 2'-deoxy Adenosine
  misc_feature (1)..(1): 2'-deoxy Guanosine
  misc_feature (3)..(4): 2'-deoxy Guanosine
  misc_feature (12)..(13): 2'-deoxy Guanosine
  misc_feature (17)..(18): 2'-deoxy Guanosine
  misc_feature (20)..(20): Phosphorothioate or Phosphorodithioate 3'-Internucleotide Linkage
  misc_feature (20)..(21): n stands for thymidine
  misc_feature (21)..(21): 3'-3 attached terminal glyceryl moeity
gaggccucauaggcaaggann

SEQ ID NO: 1247 - RNA, 19 nt, Artificial Sequence
  Description of Artificial Sequence:  Target Sequence/siNA sense region
aguugcacugaguguggcu

SEQ ID NO: 1248 - RNA, 19 nt, Artificial Sequence
  Description of Artificial Sequence:  Target Sequence/siNA sense region
ugaagcagcgaggcgggag

SEQ ID NO: 1249 - RNA, 19 nt, Artificial Sequence
  Description of Artificial Sequence:  Target Sequence/siNA sense region
guggaggugcgcggaguca

SEQ ID NO: 1250 - RNA, 19 nt, Artificial Sequence
  Description of Artificial Sequence:  Target Sequence/siNA sense region
aggcagacagacagacaca

SEQ ID NO: 1251 - RNA, 19 nt, Artificial Sequence
  Description of Artificial Sequence:  Target Sequence/siNA sense region
agccagccagccaggucgg

SEQ ID NO: 1252 - RNA, 19 nt, Artificial Sequence
  Description of Artificial Sequence:  Target Sequence/siNA sense region
gcaguauaguccgaacugc

SEQ ID NO: 1253 - RNA, 19 nt, Artificial Sequence
  Description of Artificial Sequence:  Target Sequence/siNA sense region
caaaucuuauuuucuuuuc

SEQ ID NO: 1254 - RNA, 19 nt, Artificial Sequence
  Description of Artificial Sequence:  Target Sequence/siNA sense region
caccuucucucuaacugcc

SEQ ID NO: 1255 - RNA, 19 nt, Artificial Sequence
  Description of Artificial Sequence:  Target Sequence/siNA sense region
ccagagcuagcgccugugg

SEQ ID NO: 1256 - RNA, 19 nt, Artificial Sequence
  Description of Artificial Sequence:  Target Sequence/siNA sense region
gcucccgggcuggugguuc

SEQ ID NO: 1257 - RNA, 19 nt, Artificial Sequence
  Description of Artificial Sequence:  Target Sequence/siNA sense region
cgggaguguccagagagcc

SEQ ID NO: 1258 - RNA, 19 nt, Artificial Sequence
  Description of Artificial Sequence:  Target Sequence/siNA sense region
cuugucuccagccggcccc

SEQ ID NO: 1259 - RNA, 19 nt, Artificial Sequence
  Description of Artificial Sequence:  Target Sequence/siNA sense region
cgggaggagagcccugcug

SEQ ID NO: 1260 - RNA, 19 nt, Artificial Sequence
  Description of Artificial Sequence:  Target Sequence/siNA sense region
gcccaggcgcuguugacag

SEQ ID NO: 1261 - RNA, 19 nt, Artificial Sequence
  Description of Artificial Sequence:  Target Sequence/siNA sense region
gcggcggaaagcagcggua

SEQ ID NO: 1262 - RNA, 19 nt, Artificial Sequence
  Description of Artificial Sequence:  Target Sequence/siNA sense region
accccacgcgcccgccggg

SEQ ID NO: 1263 - RNA, 19 nt, Artificial Sequence
  Description of Artificial Sequence:  Target Sequence/siNA sense region
gggacgucggcgagcggcu

SEQ ID NO: 1264 - RNA, 19 nt, Artificial Sequence
  Description of Artificial Sequence:  Target Sequence/siNA sense region
ugcagcagcaaagaacuuu

SEQ ID NO: 1265 - RNA, 19 nt, Artificial Sequence
  Description of Artificial Sequence:  Target Sequence/siNA sense region
ucccggcggggaggaccgg

SEQ ID NO: 1266 - RNA, 19 nt, Artificial Sequence
  Description of Artificial Sequence:  Target Sequence/siNA sense region
gagacaaguggcagagucc

SEQ ID NO: 1267 - RNA, 19 nt, Artificial Sequence
  Description of Artificial Sequence:  Target Sequence/siNA sense region
ccggagcgaacuuuugcaa

SEQ ID NO: 1268 - RNA, 19 nt, Artificial Sequence
  Description of Artificial Sequence:  Target Sequence/siNA sense region
agccuuuccugcgucuuag

SEQ ID NO: 1269 - RNA, 19 nt, Artificial Sequence
  Description of Artificial Sequence:  Target Sequence/siNA sense region
ggcuucuccacggcgguaa

SEQ ID NO: 1270 - RNA, 19 nt, Artificial Sequence
  Description of Artificial Sequence:  Target Sequence/siNA sense region
aagaccagaaggcggcgga

SEQ ID NO: 1271 - RNA, 19 nt, Artificial Sequence
  Description of Artificial Sequence:  Target Sequence/siNA sense region
agagccacgcaagagaaga

SEQ ID NO: 1272 - RNA, 19 nt, Artificial Sequence
  Description of Artificial Sequence:  Target Sequence/siNA sense region
aaggacgugcgcucagcuu

SEQ ID NO: 1273 - RNA, 19 nt, Artificial Sequence
  Description of Artificial Sequence:  Target Sequence/siNA sense region
ucgcucgcaccgguuguug

SEQ ID NO: 1274 - RNA, 19 nt, Artificial Sequence
  Description of Artificial Sequence:  Target Sequence/siNA sense region
gaacuugggcgagcgcgag

SEQ ID NO: 1275 - RNA, 19 nt, Artificial Sequence
  Description of Artificial Sequence:  Target Sequence/siNA sense region
gccgcggcugccgggcgcc

SEQ ID NO: 1276 - RNA, 19 nt, Artificial Sequence
  Description of Artificial Sequence:  Target Sequence/siNA sense region
ccccucccccuagcagcgg

SEQ ID NO: 1277 - RNA, 19 nt, Artificial Sequence
  Description of Artificial Sequence:  Target Sequence/siNA sense region
gaggaggggacaagucguc

SEQ ID NO: 1278 - RNA, 19 nt, Artificial Sequence
  Description of Artificial Sequence:  Target Sequence/siNA sense region
cggaguccgggcggccaag

SEQ ID NO: 1279 - RNA, 19 nt, Artificial Sequence
  Description of Artificial Sequence:  Target Sequence/siNA sense region
gacccgccgccggccggcc

SEQ ID NO: 1280 - RNA, 19 nt, Artificial Sequence
  Description of Artificial Sequence:  Target Sequence/siNA sense region
cacugcaggguccgcacug

SEQ ID NO: 1281 - RNA, 19 nt, Artificial Sequence
  Description of Artificial Sequence:  Target Sequence/siNA sense region
gauccgcuccgcggggaga

SEQ ID NO: 1282 - RNA, 19 nt, Artificial Sequence
  Description of Artificial Sequence:  Target Sequence/siNA sense region
agccgcugcucugggaagu

SEQ ID NO: 1283 - RNA, 19 nt, Artificial Sequence
  Description of Artificial Sequence:  Target Sequence/siNA sense region
ugaguucgccugcggacuc

SEQ ID NO: 1284 - RNA, 19 nt, Artificial Sequence
  Description of Artificial Sequence:  Target Sequence/siNA sense region
ccgaggaaccgcugcgccc

SEQ ID NO: 1285 - RNA, 19 nt, Artificial Sequence
  Description of Artificial Sequence:  Target Sequence/siNA sense region
cgaagagcgcucagugagu

SEQ ID NO: 1286 - RNA, 19 nt, Artificial Sequence
  Description of Artificial Sequence:  Target Sequence/siNA sense region
ugaccgcgacuuuucaaag

SEQ ID NO: 1287 - RNA, 19 nt, Artificial Sequence
  Description of Artificial Sequence:  Target Sequence/siNA sense region
gccggguagcgcgcgcgag

SEQ ID NO: 1288 - RNA, 19 nt, Artificial Sequence
  Description of Artificial Sequence:  Target Sequence/siNA sense region
gucgacaaguaagagugcg

SEQ ID NO: 1289 - RNA, 19 nt, Artificial Sequence
  Description of Artificial Sequence:  Target Sequence/siNA sense region
gggaggcaucuuaauuaac

SEQ ID NO: 1290 - RNA, 19 nt, Artificial Sequence
  Description of Artificial Sequence:  Target Sequence/siNA sense region
cccugcgcucccuggagcg

SEQ ID NO: 1291 - RNA, 19 nt, Artificial Sequence
  Description of Artificial Sequence:  Target Sequence/siNA sense region
gagcuggugaggagggcgc

SEQ ID NO: 1292 - RNA, 19 nt, Artificial Sequence
  Description of Artificial Sequence:  Target Sequence/siNA sense region
cagcggggacgacagccag

SEQ ID NO: 1293 - RNA, 19 nt, Artificial Sequence
  Description of Artificial Sequence:  Target Sequence/siNA sense region
gcgggugcgugcgcucuua

SEQ ID NO: 1294 - RNA, 19 nt, Artificial Sequence
  Description of Artificial Sequence:  Target Sequence/siNA sense region
agagaaacuuucccuguca

SEQ ID NO: 1295 - RNA, 19 nt, Artificial Sequence
  Description of Artificial Sequence:  Target Sequence/siNA sense region
aaaggcuccggggggcgcg

SEQ ID NO: 1296 - RNA, 19 nt, Artificial Sequence
  Description of Artificial Sequence:  Target Sequence/siNA sense region
gggugucccccgcuugcca

SEQ ID NO: 1297 - RNA, 19 nt, Artificial Sequence
  Description of Artificial Sequence:  Target Sequence/siNA sense region
agagcccuguugcggcccc

SEQ ID NO: 1298 - RNA, 19 nt, Artificial Sequence
  Description of Artificial Sequence:  Target Sequence/siNA sense region
cgaaacuugugcgcgcacg

SEQ ID NO: 1299 - RNA, 19 nt, Artificial Sequence
  Description of Artificial Sequence:  Target Sequence/siNA sense region
gccaaacuaaccucacgug

SEQ ID NO: 1300 - RNA, 19 nt, Artificial Sequence
  Description of Artificial Sequence:  Target Sequence/siNA sense region
gaagugacggacuguucua

SEQ ID NO: 1301 - RNA, 19 nt, Artificial Sequence
  Description of Artificial Sequence:  Target Sequence/siNA sense region
augacugcaaagauggaaa

SEQ ID NO: 1302 - RNA, 19 nt, Artificial Sequence
  Description of Artificial Sequence:  Target Sequence/siNA sense region
acgaccuucuaugacgaug

SEQ ID NO: 1303 - RNA, 19 nt, Artificial Sequence
  Description of Artificial Sequence:  Target Sequence/siNA sense region
gcccucaacgccucguucc

SEQ ID NO: 1304 - RNA, 19 nt, Artificial Sequence
  Description of Artificial Sequence:  Target Sequence/siNA sense region
cucccguccgagagcggac

SEQ ID NO: 1305 - RNA, 19 nt, Artificial Sequence
  Description of Artificial Sequence:  Target Sequence/siNA sense region
ccuuauggcuacaguaacc

SEQ ID NO: 1306 - RNA, 19 nt, Artificial Sequence
  Description of Artificial Sequence:  Target Sequence/siNA sense region
cccaagauccugaaacaga

SEQ ID NO: 1307 - RNA, 19 nt, Artificial Sequence
  Description of Artificial Sequence:  Target Sequence/siNA sense region
agcaugacccugaaccugg

SEQ ID NO: 1308 - RNA, 19 nt, Artificial Sequence
  Description of Artificial Sequence:  Target Sequence/siNA sense region
gccgacccaguggggagcc

SEQ ID NO: 1309 - RNA, 19 nt, Artificial Sequence
  Description of Artificial Sequence:  Target Sequence/siNA sense region
cugaagccgcaccuccgcg

SEQ ID NO: 1310 - RNA, 19 nt, Artificial Sequence
  Description of Artificial Sequence:  Target Sequence/siNA sense region
gccaagaacucggaccucc

SEQ ID NO: 1311 - RNA, 19 nt, Artificial Sequence
  Description of Artificial Sequence:  Target Sequence/siNA sense region
cucaccucgcccgacgugg

SEQ ID NO: 1312 - RNA, 19 nt, Artificial Sequence
  Description of Artificial Sequence:  Target Sequence/siNA sense region
gggcugcucaagcuggcgu

SEQ ID NO: 1313 - RNA, 19 nt, Artificial Sequence
  Description of Artificial Sequence:  Target Sequence/siNA sense region
ucgcccgagcuggagcgcc

SEQ ID NO: 1314 - RNA, 19 nt, Artificial Sequence
  Description of Artificial Sequence:  Target Sequence/siNA sense region
cugauaauccaguccagca

SEQ ID NO: 1315 - RNA, 19 nt, Artificial Sequence
  Description of Artificial Sequence:  Target Sequence/siNA sense region
aacgggcacaucaccacca

SEQ ID NO: 1316 - RNA, 19 nt, Artificial Sequence
  Description of Artificial Sequence:  Target Sequence/siNA sense region
acgccgacccccacccagu

SEQ ID NO: 1317 - RNA, 19 nt, Artificial Sequence
  Description of Artificial Sequence:  Target Sequence/siNA sense region
uuccugugccccaagaacg

SEQ ID NO: 1318 - RNA, 19 nt, Artificial Sequence
  Description of Artificial Sequence:  Target Sequence/siNA sense region
gugacagaugagcaggagg

SEQ ID NO: 1319 - RNA, 19 nt, Artificial Sequence
  Description of Artificial Sequence:  Target Sequence/siNA sense region
ggguucgccgagggcuucg

SEQ ID NO: 1320 - RNA, 19 nt, Artificial Sequence
  Description of Artificial Sequence:  Target Sequence/siNA sense region
gugcgcgcccuggccgaac

SEQ ID NO: 1321 - RNA, 19 nt, Artificial Sequence
  Description of Artificial Sequence:  Target Sequence/siNA sense region
cugcacagccagaacacgc

SEQ ID NO: 1322 - RNA, 19 nt, Artificial Sequence
  Description of Artificial Sequence:  Target Sequence/siNA sense region
cugcccagcgucacgucgg

SEQ ID NO: 1323 - RNA, 19 nt, Artificial Sequence
  Description of Artificial Sequence:  Target Sequence/siNA sense region
gcggcgcagccggucaacg

SEQ ID NO: 1324 - RNA, 19 nt, Artificial Sequence
  Description of Artificial Sequence:  Target Sequence/siNA sense region
ggggcaggcaugguggcuc

SEQ ID NO: 1325 - RNA, 19 nt, Artificial Sequence
  Description of Artificial Sequence:  Target Sequence/siNA sense region
cccgcgguagccucggugg

SEQ ID NO: 1326 - RNA, 19 nt, Artificial Sequence
  Description of Artificial Sequence:  Target Sequence/siNA sense region
gcagggggcagcggcagcg

SEQ ID NO: 1327 - RNA, 19 nt, Artificial Sequence
  Description of Artificial Sequence:  Target Sequence/siNA sense region
ggcggcuucagcgccagcc

SEQ ID NO: 1328 - RNA, 19 nt, Artificial Sequence
  Description of Artificial Sequence:  Target Sequence/siNA sense region
cugcacagcgagccgccgg

SEQ ID NO: 1329 - RNA, 19 nt, Artificial Sequence
  Description of Artificial Sequence:  Target Sequence/siNA sense region
gucuacgcaaaccucagca

SEQ ID NO: 1330 - RNA, 19 nt, Artificial Sequence
  Description of Artificial Sequence:  Target Sequence/siNA sense region
aacuucaacccaggcgcgc

SEQ ID NO: 1331 - RNA, 19 nt, Artificial Sequence
  Description of Artificial Sequence:  Target Sequence/siNA sense region
cugagcagcggcggcgggg

SEQ ID NO: 1332 - RNA, 19 nt, Artificial Sequence
  Description of Artificial Sequence:  Target Sequence/siNA sense region
gcgcccuccuacggcgcgg

SEQ ID NO: 1333 - RNA, 19 nt, Artificial Sequence
  Description of Artificial Sequence:  Target Sequence/siNA sense region
gccggccuggccuuucccg

SEQ ID NO: 1334 - RNA, 19 nt, Artificial Sequence
  Description of Artificial Sequence:  Target Sequence/siNA sense region
gcgcaaccccagcagcagc

SEQ ID NO: 1335 - RNA, 19 nt, Artificial Sequence
  Description of Artificial Sequence:  Target Sequence/siNA sense region
cagcagccgccgcaccacc

SEQ ID NO: 1336 - RNA, 19 nt, Artificial Sequence
  Description of Artificial Sequence:  Target Sequence/siNA sense region
cugccccagcagaugcccg

SEQ ID NO: 1337 - RNA, 19 nt, Artificial Sequence
  Description of Artificial Sequence:  Target Sequence/siNA sense region
gugcagcacccgcggcugc

SEQ ID NO: 1338 - RNA, 19 nt, Artificial Sequence
  Description of Artificial Sequence:  Target Sequence/siNA sense region
caggcccugaaggaggagc

SEQ ID NO: 1339 - RNA, 19 nt, Artificial Sequence
  Description of Artificial Sequence:  Target Sequence/siNA sense region
ccucagacagugcccgaga

SEQ ID NO: 1340 - RNA, 19 nt, Artificial Sequence
  Description of Artificial Sequence:  Target Sequence/siNA sense region
augcccggcgagacaccgc

SEQ ID NO: 1341 - RNA, 19 nt, Artificial Sequence
  Description of Artificial Sequence:  Target Sequence/siNA sense region
ccccugucccccaucgaca

SEQ ID NO: 1342 - RNA, 19 nt, Artificial Sequence
  Description of Artificial Sequence:  Target Sequence/siNA sense region
auggagucccaggagcgga

SEQ ID NO: 1343 - RNA, 19 nt, Artificial Sequence
  Description of Artificial Sequence:  Target Sequence/siNA sense region
aucaaggcggagaggaagc

SEQ ID NO: 1344 - RNA, 19 nt, Artificial Sequence
  Description of Artificial Sequence:  Target Sequence/siNA sense region
cgcaugaggaaccgcaucg

SEQ ID NO: 1345 - RNA, 19 nt, Artificial Sequence
  Description of Artificial Sequence:  Target Sequence/siNA sense region
gcugccuccaagugccgaa

SEQ ID NO: 1346 - RNA, 19 nt, Artificial Sequence
  Description of Artificial Sequence:  Target Sequence/siNA sense region
aaaaggaagcuggagagaa

SEQ ID NO: 1347 - RNA, 19 nt, Artificial Sequence
  Description of Artificial Sequence:  Target Sequence/siNA sense region
aucgcccggcuggaggaaa

SEQ ID NO: 1348 - RNA, 19 nt, Artificial Sequence
  Description of Artificial Sequence:  Target Sequence/siNA sense region
aaagugaaaaccuugaaag

SEQ ID NO: 1349 - RNA, 19 nt, Artificial Sequence
  Description of Artificial Sequence:  Target Sequence/siNA sense region
gcucagaacucggagcugg

SEQ ID NO: 1350 - RNA, 19 nt, Artificial Sequence
  Description of Artificial Sequence:  Target Sequence/siNA sense region
gcguccacggccaacaugc

SEQ ID NO: 1351 - RNA, 19 nt, Artificial Sequence
  Description of Artificial Sequence:  Target Sequence/siNA sense region
cucagggaacagguggcac

SEQ ID NO: 1352 - RNA, 19 nt, Artificial Sequence
  Description of Artificial Sequence:  Target Sequence/siNA sense region
cagcuuaaacagaaaguca

SEQ ID NO: 1353 - RNA, 19 nt, Artificial Sequence
  Description of Artificial Sequence:  Target Sequence/siNA sense region
augaaccacguuaacagug

SEQ ID NO: 1354 - RNA, 19 nt, Artificial Sequence
  Description of Artificial Sequence:  Target Sequence/siNA sense region
gggugccaacucaugcuaa

SEQ ID NO: 1355 - RNA, 19 nt, Artificial Sequence
  Description of Artificial Sequence:  Target Sequence/siNA sense region
acgcagcaguugcaaacau

SEQ ID NO: 1356 - RNA, 19 nt, Artificial Sequence
  Description of Artificial Sequence:  Target Sequence/siNA sense region
uuuugaagagagaccgucg

SEQ ID NO: 1357 - RNA, 19 nt, Artificial Sequence
  Description of Artificial Sequence:  Target Sequence/siNA sense region
gggggcugaggggcaacga

SEQ ID NO: 1358 - RNA, 19 nt, Artificial Sequence
  Description of Artificial Sequence:  Target Sequence/siNA sense region
aagaaaaaaaauaacacag

SEQ ID NO: 1359 - RNA, 19 nt, Artificial Sequence
  Description of Artificial Sequence:  Target Sequence/siNA sense region
gagagacagacuugagaac

SEQ ID NO: 1360 - RNA, 19 nt, Artificial Sequence
  Description of Artificial Sequence:  Target Sequence/siNA sense region
cuugacaaguugcgacgga

SEQ ID NO: 1361 - RNA, 19 nt, Artificial Sequence
  Description of Artificial Sequence:  Target Sequence/siNA sense region
agagaaaaaagaagugucc

SEQ ID NO: 1362 - RNA, 19 nt, Artificial Sequence
  Description of Artificial Sequence:  Target Sequence/siNA sense region
cgagaacuaaagccaaggg

SEQ ID NO: 1363 - RNA, 19 nt, Artificial Sequence
  Description of Artificial Sequence:  Target Sequence/siNA sense region
guauccaaguuggacuggg

SEQ ID NO: 1364 - RNA, 19 nt, Artificial Sequence
  Description of Artificial Sequence:  Target Sequence/siNA sense region
guucggucugacggcgccc

SEQ ID NO: 1365 - RNA, 19 nt, Artificial Sequence
  Description of Artificial Sequence:  Target Sequence/siNA sense region
cccagugugcacgaguggg

SEQ ID NO: 1366 - RNA, 19 nt, Artificial Sequence
  Description of Artificial Sequence:  Target Sequence/siNA sense region
gaaggacuuggucgcgccc

SEQ ID NO: 1367 - RNA, 19 nt, Artificial Sequence
  Description of Artificial Sequence:  Target Sequence/siNA sense region
cucccuuggcguggagcca

SEQ ID NO: 1368 - RNA, 19 nt, Artificial Sequence
  Description of Artificial Sequence:  Target Sequence/siNA sense region
agggagcggccgccugcgg

SEQ ID NO: 1369 - RNA, 19 nt, Artificial Sequence
  Description of Artificial Sequence:  Target Sequence/siNA sense region
ggcugccccgcuuugcgga

SEQ ID NO: 1370 - RNA, 19 nt, Artificial Sequence
  Description of Artificial Sequence:  Target Sequence/siNA sense region
acgggcuguccccgcgcga

SEQ ID NO: 1371 - RNA, 19 nt, Artificial Sequence
  Description of Artificial Sequence:  Target Sequence/siNA sense region
aacggaacguuggacuuuc

SEQ ID NO: 1372 - RNA, 19 nt, Artificial Sequence
  Description of Artificial Sequence:  Target Sequence/siNA sense region
cguuaacauugaccaagaa

SEQ ID NO: 1373 - RNA, 19 nt, Artificial Sequence
  Description of Artificial Sequence:  Target Sequence/siNA sense region
acugcauggaccuaacauu

SEQ ID NO: 1374 - RNA, 19 nt, Artificial Sequence
  Description of Artificial Sequence:  Target Sequence/siNA sense region
ucgaucucauucaguauua

SEQ ID NO: 1375 - RNA, 19 nt, Artificial Sequence
  Description of Artificial Sequence:  Target Sequence/siNA sense region
aaaggggggagggggaggg

SEQ ID NO: 1376 - RNA, 19 nt, Artificial Sequence
  Description of Artificial Sequence:  Target Sequence/siNA sense region
ggguuacaaacugcaauag

SEQ ID NO: 1377 - RNA, 19 nt, Artificial Sequence
  Description of Artificial Sequence:  Target Sequence/siNA sense region
gagacuguagauugcuucu

SEQ ID NO: 1378 - RNA, 19 nt, Artificial Sequence
  Description of Artificial Sequence:  Target Sequence/siNA sense region
uguaguacuccuuaagaac

SEQ ID NO: 1379 - RNA, 19 nt, Artificial Sequence
  Description of Artificial Sequence:  Target Sequence/siNA sense region
cacaaagcggggggagggu

SEQ ID NO: 1380 - RNA, 19 nt, Artificial Sequence
  Description of Artificial Sequence:  Target Sequence/siNA sense region
uuggggaggggcggcagga

SEQ ID NO: 1381 - RNA, 19 nt, Artificial Sequence
  Description of Artificial Sequence:  Target Sequence/siNA sense region
agggagguuugugagagcg

SEQ ID NO: 1382 - RNA, 19 nt, Artificial Sequence
  Description of Artificial Sequence:  Target Sequence/siNA sense region
gaggcugagccuacagaug

SEQ ID NO: 1383 - RNA, 19 nt, Artificial Sequence
  Description of Artificial Sequence:  Target Sequence/siNA sense region
gaacucuuucuggccugcu

SEQ ID NO: 1384 - RNA, 19 nt, Artificial Sequence
  Description of Artificial Sequence:  Target Sequence/siNA sense region
uuucguuaacuguguaugu

SEQ ID NO: 1385 - RNA, 19 nt, Artificial Sequence
  Description of Artificial Sequence:  Target Sequence/siNA sense region
uacauauauauauuuuuua

SEQ ID NO: 1386 - RNA, 19 nt, Artificial Sequence
  Description of Artificial Sequence:  Target Sequence/siNA sense region
aauuugauuaaagcugauu

SEQ ID NO: 1387 - RNA, 19 nt, Artificial Sequence
  Description of Artificial Sequence:  Target Sequence/siNA sense region
uacugucaauaaacagcuu

SEQ ID NO: 1388 - RNA, 19 nt, Artificial Sequence
  Description of Artificial Sequence:  Target Sequence/siNA sense region
ucaugccuuuguaaguuau

SEQ ID NO: 1389 - RNA, 19 nt, Artificial Sequence
  Description of Artificial Sequence:  Target Sequence/siNA sense region
uuucuuguuuguuuguuug

SEQ ID NO: 1390 - RNA, 19 nt, Artificial Sequence
  Description of Artificial Sequence:  Target Sequence/siNA sense region
ggguauccugcccaguguu

SEQ ID NO: 1391 - RNA, 19 nt, Artificial Sequence
  Description of Artificial Sequence:  Target Sequence/siNA sense region
uguuuguaaauaagagauu

SEQ ID NO: 1392 - RNA, 19 nt, Artificial Sequence
  Description of Artificial Sequence:  Target Sequence/siNA sense region
uuggagcacucugaguuua

SEQ ID NO: 1393 - RNA, 19 nt, Artificial Sequence
  Description of Artificial Sequence:  Target Sequence/siNA sense region
accauuuguaauaaaguau

SEQ ID NO: 1394 - RNA, 19 nt, Artificial Sequence
  Description of Artificial Sequence:  Target Sequence/siNA sense region
uauaauuuuuuuauguuuu

SEQ ID NO: 1395 - RNA, 19 nt, Artificial Sequence
  Description of Artificial Sequence:  Target Sequence/siNA sense region
uguuucugaaaauuccaga

SEQ ID NO: 1396 - RNA, 19 nt, Artificial Sequence
  Description of Artificial Sequence:  Target Sequence/siNA sense region
aaaggauauuuaagaaaau

SEQ ID NO: 1397 - RNA, 19 nt, Artificial Sequence
  Description of Artificial Sequence:  Target Sequence/siNA sense region
uacaauaaacuauuggaaa

SEQ ID NO: 1398 - RNA, 19 nt, Artificial Sequence
  Description of Artificial Sequence:  Target Sequence/siNA sense region
aguacuccccuaaccucuu

SEQ ID NO: 1399 - RNA, 19 nt, Artificial Sequence
  Description of Artificial Sequence:  Target Sequence/siNA sense region
uuucugcaucaucuguaga

SEQ ID NO: 1400 - RNA, 19 nt, Artificial Sequence
  Description of Artificial Sequence:  Target Sequence/siNA sense region
auccuagucuaucuaggug

SEQ ID NO: 1401 - RNA, 19 nt, Artificial Sequence
  Description of Artificial Sequence:  Target Sequence/siNA sense region
ggaguugaaagaguuaaga

SEQ ID NO: 1402 - RNA, 19 nt, Artificial Sequence
  Description of Artificial Sequence:  Target Sequence/siNA sense region
aaugcucgauaaaaucacu

SEQ ID NO: 1403 - RNA, 19 nt, Artificial Sequence
  Description of Artificial Sequence:  Target Sequence/siNA sense region
ucucagugcuucuuacuau

SEQ ID NO: 1404 - RNA, 19 nt, Artificial Sequence
  Description of Artificial Sequence:  Target Sequence/siNA sense region
uuaagcaguaaaaacuguu

SEQ ID NO: 1405 - RNA, 19 nt, Artificial Sequence
  Description of Artificial Sequence:  Target Sequence/siNA sense region
ucucuauuagacuuagaaa

SEQ ID NO: 1406 - RNA, 19 nt, Artificial Sequence
  Description of Artificial Sequence:  Target Sequence/siNA sense region
auaaauguaccugauguac

SEQ ID NO: 1407 - RNA, 19 nt, Artificial Sequence
  Description of Artificial Sequence:  Target Sequence/siNA sense region
ccugaugcuaugucaggcu

SEQ ID NO: 1408 - RNA, 19 nt, Artificial Sequence
  Description of Artificial Sequence:  Target Sequence/siNA sense region
uucauacuccacgcucccc

SEQ ID NO: 1409 - RNA, 19 nt, Artificial Sequence
  Description of Artificial Sequence:  Target Sequence/siNA sense region
ccagcguaucuauauggaa

SEQ ID NO: 1410 - RNA, 19 nt, Artificial Sequence
  Description of Artificial Sequence:  Target Sequence/siNA sense region
auugcuuaccaaaggcuag

SEQ ID NO: 1411 - RNA, 19 nt, Artificial Sequence
  Description of Artificial Sequence:  Target Sequence/siNA sense region
gugcgauguuucaggaggc

SEQ ID NO: 1412 - RNA, 19 nt, Artificial Sequence
  Description of Artificial Sequence:  Target Sequence/siNA sense region
cuggaggaagggggguugc

SEQ ID NO: 1413 - RNA, 19 nt, Artificial Sequence
  Description of Artificial Sequence:  Target Sequence/siNA sense region
caguggagagggacagccc

SEQ ID NO: 1414 - RNA, 19 nt, Artificial Sequence
  Description of Artificial Sequence:  Target Sequence/siNA sense region
cacugagaagucaaacauu

SEQ ID NO: 1415 - RNA, 19 nt, Artificial Sequence
  Description of Artificial Sequence:  Target Sequence/siNA sense region
uucaaaguuuggauugcau

SEQ ID NO: 1416 - RNA, 19 nt, Artificial Sequence
  Description of Artificial Sequence:  Target Sequence/siNA sense region
ucaaguggcaugugcugug

SEQ ID NO: 1417 - RNA, 19 nt, Artificial Sequence
  Description of Artificial Sequence:  Target Sequence/siNA sense region
gaccauuuauaauguuaga

SEQ ID NO: 1418 - RNA, 19 nt, Artificial Sequence
  Description of Artificial Sequence:  Target Sequence/siNA sense region
aaauuuuacaauaggugcu

SEQ ID NO: 1419 - RNA, 19 nt, Artificial Sequence
  Description of Artificial Sequence:  Target Sequence/siNA sense region
uuauucucaaagcaggaau

SEQ ID NO: 1420 - RNA, 19 nt, Artificial Sequence
  Description of Artificial Sequence:  Target Sequence/siNA sense region
uugguggcagauuuuacaa

SEQ ID NO: 1421 - RNA, 19 nt, Artificial Sequence
  Description of Artificial Sequence:  Target Sequence/siNA sense region
aaagauguauccuuccaau

SEQ ID NO: 1422 - RNA, 19 nt, Artificial Sequence
  Description of Artificial Sequence:  Target Sequence/siNA sense region
uuuggaaucuucucuuuga

SEQ ID NO: 1423 - RNA, 19 nt, Artificial Sequence
  Description of Artificial Sequence:  Target Sequence/siNA sense region
acaauuccuagauaaaaag

SEQ ID NO: 1424 - RNA, 19 nt, Artificial Sequence
  Description of Artificial Sequence:  Target Sequence/siNA sense region
gauggccuuugucuuauga

SEQ ID NO: 1425 - RNA, 19 nt, Artificial Sequence
  Description of Artificial Sequence:  Target Sequence/siNA sense region
aauauuuauaacagcauuc

SEQ ID NO: 1426 - RNA, 19 nt, Artificial Sequence
  Description of Artificial Sequence:  Target Sequence/siNA sense region
cugucacaauaaauguauu

SEQ ID NO: 1427 - RNA, 19 nt, Artificial Sequence
  Description of Artificial Sequence:  Target Sequence/siNA sense region
uaaauguauucaaauacca

SEQ ID NO: 1428 - RNA, 19 nt, Artificial Sequence
  Description of Artificial Sequence:  siNA antisense region
agccacacucagugcaacu

SEQ ID NO: 1429 - RNA, 19 nt, Artificial Sequence
  Description of Artificial Sequence:  siNA antisense region
cucccgccucgcugcuuca

SEQ ID NO: 1430 - RNA, 19 nt, Artificial Sequence
  Description of Artificial Sequence:  siNA antisense region
ugacuccgcgcaccuccac

SEQ ID NO: 1431 - RNA, 19 nt, Artificial Sequence
  Description of Artificial Sequence:  siNA antisense region
ugugucugucugucugccu

SEQ ID NO: 1432 - RNA, 19 nt, Artificial Sequence
  Description of Artificial Sequence:  siNA antisense region
ccgaccuggcuggcuggcu

SEQ ID NO: 1433 - RNA, 19 nt, Artificial Sequence
  Description of Artificial Sequence:  siNA antisense region
gcaguucggacuauacugc

SEQ ID NO: 1434 - RNA, 19 nt, Artificial Sequence
  Description of Artificial Sequence:  siNA antisense region
gaaaagaaaauaagauuug

SEQ ID NO: 1435 - RNA, 19 nt, Artificial Sequence
  Description of Artificial Sequence:  siNA antisense region
ggcaguuagagagaaggug

SEQ ID NO: 1436 - RNA, 19 nt, Artificial Sequence
  Description of Artificial Sequence:  siNA antisense region
ccacaggcgcuagcucugg

SEQ ID NO: 1437 - RNA, 19 nt, Artificial Sequence
  Description of Artificial Sequence:  siNA antisense region
gaaccaccagcccgggagc

SEQ ID NO: 1438 - RNA, 19 nt, Artificial Sequence
  Description of Artificial Sequence:  siNA antisense region
ggcucucuggacacucccg

SEQ ID NO: 1439 - RNA, 19 nt, Artificial Sequence
  Description of Artificial Sequence:  siNA antisense region
ggggccggcuggagacaag

SEQ ID NO: 1440 - RNA, 19 nt, Artificial Sequence
  Description of Artificial Sequence:  siNA antisense region
cagcagggcucuccucccg

SEQ ID NO: 1441 - RNA, 19 nt, Artificial Sequence
  Description of Artificial Sequence:  siNA antisense region
cugucaacagcgccugggc

SEQ ID NO: 1442 - RNA, 19 nt, Artificial Sequence
  Description of Artificial Sequence:  siNA antisense region
uaccgcugcuuuccgccgc

SEQ ID NO: 1443 - RNA, 19 nt, Artificial Sequence
  Description of Artificial Sequence:  siNA antisense region
cccggcgggcgcguggggu

SEQ ID NO: 1444 - RNA, 19 nt, Artificial Sequence
  Description of Artificial Sequence:  siNA antisense region
agccgcucgccgacguccc

SEQ ID NO: 1445 - RNA, 19 nt, Artificial Sequence
  Description of Artificial Sequence:  siNA antisense region
aaaguucuuugcugcugca

SEQ ID NO: 1446 - RNA, 19 nt, Artificial Sequence
  Description of Artificial Sequence:  siNA antisense region
ccgguccuccccgccggga

SEQ ID NO: 1447 - RNA, 19 nt, Artificial Sequence
  Description of Artificial Sequence:  siNA antisense region
ggacucugccacuugucuc

SEQ ID NO: 1448 - RNA, 19 nt, Artificial Sequence
  Description of Artificial Sequence:  siNA antisense region
uugcaaaaguucgcuccgg

SEQ ID NO: 1449 - RNA, 19 nt, Artificial Sequence
  Description of Artificial Sequence:  siNA antisense region
cuaagacgcaggaaaggcu

SEQ ID NO: 1450 - RNA, 19 nt, Artificial Sequence
  Description of Artificial Sequence:  siNA antisense region
uuaccgccguggagaagcc

SEQ ID NO: 1451 - RNA, 19 nt, Artificial Sequence
  Description of Artificial Sequence:  siNA antisense region
uccgccgccuucuggucuu

SEQ ID NO: 1452 - RNA, 19 nt, Artificial Sequence
  Description of Artificial Sequence:  siNA antisense region
ucuucucuugcguggcucu

SEQ ID NO: 1453 - RNA, 19 nt, Artificial Sequence
  Description of Artificial Sequence:  siNA antisense region
aagcugagcgcacguccuu

SEQ ID NO: 1454 - RNA, 19 nt, Artificial Sequence
  Description of Artificial Sequence:  siNA antisense region
caacaaccggugcgagcga

SEQ ID NO: 1455 - RNA, 19 nt, Artificial Sequence
  Description of Artificial Sequence:  siNA antisense region
cucgcgcucgcccaaguuc

SEQ ID NO: 1456 - RNA, 19 nt, Artificial Sequence
  Description of Artificial Sequence:  siNA antisense region
ggcgcccggcagccgcggc

SEQ ID NO: 1457 - RNA, 19 nt, Artificial Sequence
  Description of Artificial Sequence:  siNA antisense region
ccgcugcuagggggagggg

SEQ ID NO: 1458 - RNA, 19 nt, Artificial Sequence
  Description of Artificial Sequence:  siNA antisense region
gacgacuuguccccuccuc

SEQ ID NO: 1459 - RNA, 19 nt, Artificial Sequence
  Description of Artificial Sequence:  siNA antisense region
cuuggccgcccggacuccg

SEQ ID NO: 1460 - RNA, 19 nt, Artificial Sequence
  Description of Artificial Sequence:  siNA antisense region
ggccggccggcggcggguc

SEQ ID NO: 1461 - RNA, 19 nt, Artificial Sequence
  Description of Artificial Sequence:  siNA antisense region
cagugcggacccugcagug

SEQ ID NO: 1462 - RNA, 19 nt, Artificial Sequence
  Description of Artificial Sequence:  siNA antisense region
ucuccccgcggagcggauc

SEQ ID NO: 1463 - RNA, 19 nt, Artificial Sequence
  Description of Artificial Sequence:  siNA antisense region
acuucccagagcagcggcu

SEQ ID NO: 1464 - RNA, 19 nt, Artificial Sequence
  Description of Artificial Sequence:  siNA antisense region
gaguccgcaggcgaacuca

SEQ ID NO: 1465 - RNA, 19 nt, Artificial Sequence
  Description of Artificial Sequence:  siNA antisense region
gggcgcagcgguuccucgg

SEQ ID NO: 1466 - RNA, 19 nt, Artificial Sequence
  Description of Artificial Sequence:  siNA antisense region
acucacugagcgcucuucg

SEQ ID NO: 1467 - RNA, 19 nt, Artificial Sequence
  Description of Artificial Sequence:  siNA antisense region
cuuugaaaagucgcgguca

SEQ ID NO: 1468 - RNA, 19 nt, Artificial Sequence
  Description of Artificial Sequence:  siNA antisense region
cucgcgcgcgcuacccggc

SEQ ID NO: 1469 - RNA, 19 nt, Artificial Sequence
  Description of Artificial Sequence:  siNA antisense region
cgcacucuuacuugucgac

SEQ ID NO: 1470 - RNA, 19 nt, Artificial Sequence
  Description of Artificial Sequence:  siNA antisense region
guuaauuaagaugccuccc

SEQ ID NO: 1471 - RNA, 19 nt, Artificial Sequence
  Description of Artificial Sequence:  siNA antisense region
cgcuccagggagcgcaggg

SEQ ID NO: 1472 - RNA, 19 nt, Artificial Sequence
  Description of Artificial Sequence:  siNA antisense region
gcgcccuccucaccagcuc

SEQ ID NO: 1473 - RNA, 19 nt, Artificial Sequence
  Description of Artificial Sequence:  siNA antisense region
cuggcugucguccccgcug

SEQ ID NO: 1474 - RNA, 19 nt, Artificial Sequence
  Description of Artificial Sequence:  siNA antisense region
uaagagcgcacgcacccgc

SEQ ID NO: 1475 - RNA, 19 nt, Artificial Sequence
  Description of Artificial Sequence:  siNA antisense region
ugacagggaaaguuucucu

SEQ ID NO: 1476 - RNA, 19 nt, Artificial Sequence
  Description of Artificial Sequence:  siNA antisense region
cgcgccccccggagccuuu

SEQ ID NO: 1477 - RNA, 19 nt, Artificial Sequence
  Description of Artificial Sequence:  siNA antisense region
uggcaagcgggggacaccc

SEQ ID NO: 1478 - RNA, 19 nt, Artificial Sequence
  Description of Artificial Sequence:  siNA antisense region
ggggccgcaacagggcucu

SEQ ID NO: 1479 - RNA, 19 nt, Artificial Sequence
  Description of Artificial Sequence:  siNA antisense region
cgugcgcgcacaaguuucg

SEQ ID NO: 1480 - RNA, 19 nt, Artificial Sequence
  Description of Artificial Sequence:  siNA antisense region
cacgugagguuaguuuggc

SEQ ID NO: 1481 - RNA, 19 nt, Artificial Sequence
  Description of Artificial Sequence:  siNA antisense region
uagaacaguccgucacuuc

SEQ ID NO: 1482 - RNA, 19 nt, Artificial Sequence
  Description of Artificial Sequence:  siNA antisense region
uuuccaucuuugcagucau

SEQ ID NO: 1483 - RNA, 19 nt, Artificial Sequence
  Description of Artificial Sequence:  siNA antisense region
caucgucauagaaggucgu

SEQ ID NO: 1484 - RNA, 19 nt, Artificial Sequence
  Description of Artificial Sequence:  siNA antisense region
ggaacgaggcguugagggc

SEQ ID NO: 1485 - RNA, 19 nt, Artificial Sequence
  Description of Artificial Sequence:  siNA antisense region
guccgcucucggacgggag

SEQ ID NO: 1486 - RNA, 19 nt, Artificial Sequence
  Description of Artificial Sequence:  siNA antisense region
gguuacuguagccauaagg

SEQ ID NO: 1487 - RNA, 19 nt, Artificial Sequence
  Description of Artificial Sequence:  siNA antisense region
ucuguuucaggaucuuggg

SEQ ID NO: 1488 - RNA, 19 nt, Artificial Sequence
  Description of Artificial Sequence:  siNA antisense region
ccagguucagggucaugcu

SEQ ID NO: 1489 - RNA, 19 nt, Artificial Sequence
  Description of Artificial Sequence:  siNA antisense region
ggcuccccacugggucggc

SEQ ID NO: 1490 - RNA, 19 nt, Artificial Sequence
  Description of Artificial Sequence:  siNA antisense region
cgcggaggugcggcuucag

SEQ ID NO: 1491 - RNA, 19 nt, Artificial Sequence
  Description of Artificial Sequence:  siNA antisense region
ggagguccgaguucuuggc

SEQ ID NO: 1492 - RNA, 19 nt, Artificial Sequence
  Description of Artificial Sequence:  siNA antisense region
ccacgucgggcgaggugag

SEQ ID NO: 1493 - RNA, 19 nt, Artificial Sequence
  Description of Artificial Sequence:  siNA antisense region
acgccagcuugagcagccc

SEQ ID NO: 1494 - RNA, 19 nt, Artificial Sequence
  Description of Artificial Sequence:  siNA antisense region
ggcgcuccagcucgggcga

SEQ ID NO: 1495 - RNA, 19 nt, Artificial Sequence
  Description of Artificial Sequence:  siNA antisense region
ugcuggacuggauuaucag

SEQ ID NO: 1496 - RNA, 19 nt, Artificial Sequence
  Description of Artificial Sequence:  siNA antisense region
ugguggugaugugcccguu

SEQ ID NO: 1497 - RNA, 19 nt, Artificial Sequence
  Description of Artificial Sequence:  siNA antisense region
acugggugggggucggcgu

SEQ ID NO: 1498 - RNA, 19 nt, Artificial Sequence
  Description of Artificial Sequence:  siNA antisense region
cguucuuggggcacaggaa

SEQ ID NO: 1499 - RNA, 19 nt, Artificial Sequence
  Description of Artificial Sequence:  siNA antisense region
ccuccugcucaucugucac

SEQ ID NO: 1500 - RNA, 19 nt, Artificial Sequence
  Description of Artificial Sequence:  siNA antisense region
cgaagcccucggcgaaccc

SEQ ID NO: 1501 - RNA, 19 nt, Artificial Sequence
  Description of Artificial Sequence:  siNA antisense region
guucggccagggcgcgcac

SEQ ID NO: 1502 - RNA, 19 nt, Artificial Sequence
  Description of Artificial Sequence:  siNA antisense region
gcguguucuggcugugcag

SEQ ID NO: 1503 - RNA, 19 nt, Artificial Sequence
  Description of Artificial Sequence:  siNA antisense region
ccgacgugacgcugggcag

SEQ ID NO: 1504 - RNA, 19 nt, Artificial Sequence
  Description of Artificial Sequence:  siNA antisense region
cguugaccggcugcgccgc

SEQ ID NO: 1505 - RNA, 19 nt, Artificial Sequence
  Description of Artificial Sequence:  siNA antisense region
gagccaccaugccugcccc

SEQ ID NO: 1506 - RNA, 19 nt, Artificial Sequence
  Description of Artificial Sequence:  siNA antisense region
ccaccgaggcuaccgcggg

SEQ ID NO: 1507 - RNA, 19 nt, Artificial Sequence
  Description of Artificial Sequence:  siNA antisense region
cgcugccgcugcccccugc

SEQ ID NO: 1508 - RNA, 19 nt, Artificial Sequence
  Description of Artificial Sequence:  siNA antisense region
ggcuggcgcugaagccgcc

SEQ ID NO: 1509 - RNA, 19 nt, Artificial Sequence
  Description of Artificial Sequence:  siNA antisense region
ccggcggcucgcugugcag

SEQ ID NO: 1510 - RNA, 19 nt, Artificial Sequence
  Description of Artificial Sequence:  siNA antisense region
ugcugagguuugcguagac

SEQ ID NO: 1511 - RNA, 19 nt, Artificial Sequence
  Description of Artificial Sequence:  siNA antisense region
gcgcgccuggguugaaguu

SEQ ID NO: 1512 - RNA, 19 nt, Artificial Sequence
  Description of Artificial Sequence:  siNA antisense region
ccccgccgccgcugcucag

SEQ ID NO: 1513 - RNA, 19 nt, Artificial Sequence
  Description of Artificial Sequence:  siNA antisense region
ccgcgccguaggagggcgc

SEQ ID NO: 1514 - RNA, 19 nt, Artificial Sequence
  Description of Artificial Sequence:  siNA antisense region
cgggaaaggccaggccggc

SEQ ID NO: 1515 - RNA, 19 nt, Artificial Sequence
  Description of Artificial Sequence:  siNA antisense region
gcugcugcugggguugcgc

SEQ ID NO: 1516 - RNA, 19 nt, Artificial Sequence
  Description of Artificial Sequence:  siNA antisense region
gguggugcggcggcugcug

SEQ ID NO: 1517 - RNA, 19 nt, Artificial Sequence
  Description of Artificial Sequence:  siNA antisense region
cgggcaucugcuggggcag

SEQ ID NO: 1518 - RNA, 19 nt, Artificial Sequence
  Description of Artificial Sequence:  siNA antisense region
gcagccgcgggugcugcac

SEQ ID NO: 1519 - RNA, 19 nt, Artificial Sequence
  Description of Artificial Sequence:  siNA antisense region
gcuccuccuucagggccug

SEQ ID NO: 1520 - RNA, 19 nt, Artificial Sequence
  Description of Artificial Sequence:  siNA antisense region
ucucgggcacugucugagg

SEQ ID NO: 1521 - RNA, 19 nt, Artificial Sequence
  Description of Artificial Sequence:  siNA antisense region
gcggugucucgccgggcau

SEQ ID NO: 1522 - RNA, 19 nt, Artificial Sequence
  Description of Artificial Sequence:  siNA antisense region
ugucgaugggggacagggg

SEQ ID NO: 1523 - RNA, 19 nt, Artificial Sequence
  Description of Artificial Sequence:  siNA antisense region
uccgcuccugggacuccau

SEQ ID NO: 1524 - RNA, 19 nt, Artificial Sequence
  Description of Artificial Sequence:  siNA antisense region
gcuuccucuccgccuugau

SEQ ID NO: 1525 - RNA, 19 nt, Artificial Sequence
  Description of Artificial Sequence:  siNA antisense region
cgaugcgguuccucaugcg

SEQ ID NO: 1526 - RNA, 19 nt, Artificial Sequence
  Description of Artificial Sequence:  siNA antisense region
uucggcacuuggaggcagc

SEQ ID NO: 1527 - RNA, 19 nt, Artificial Sequence
  Description of Artificial Sequence:  siNA antisense region
uucucuccagcuuccuuuu

SEQ ID NO: 1528 - RNA, 19 nt, Artificial Sequence
  Description of Artificial Sequence:  siNA antisense region
uuuccuccagccgggcgau

SEQ ID NO: 1529 - RNA, 19 nt, Artificial Sequence
  Description of Artificial Sequence:  siNA antisense region
cuuucaagguuuucacuuu

SEQ ID NO: 1530 - RNA, 19 nt, Artificial Sequence
  Description of Artificial Sequence:  siNA antisense region
ccagcuccgaguucugagc

SEQ ID NO: 1531 - RNA, 19 nt, Artificial Sequence
  Description of Artificial Sequence:  siNA antisense region
gcauguuggccguggacgc

SEQ ID NO: 1532 - RNA, 19 nt, Artificial Sequence
  Description of Artificial Sequence:  siNA antisense region
gugccaccuguucccugag

SEQ ID NO: 1533 - RNA, 19 nt, Artificial Sequence
  Description of Artificial Sequence:  siNA antisense region
ugacuuucuguuuaagcug

SEQ ID NO: 1534 - RNA, 19 nt, Artificial Sequence
  Description of Artificial Sequence:  siNA antisense region
cacuguuaacgugguucau

SEQ ID NO: 1535 - RNA, 19 nt, Artificial Sequence
  Description of Artificial Sequence:  siNA antisense region
uuagcaugaguuggcaccc

SEQ ID NO: 1536 - RNA, 19 nt, Artificial Sequence
  Description of Artificial Sequence:  siNA antisense region
auguuugcaacugcugcgu

SEQ ID NO: 1537 - RNA, 19 nt, Artificial Sequence
  Description of Artificial Sequence:  siNA antisense region
cgacggucucucuucaaaa

SEQ ID NO: 1538 - RNA, 19 nt, Artificial Sequence
  Description of Artificial Sequence:  siNA antisense region
ucguugccccucagccccc

SEQ ID NO: 1539 - RNA, 19 nt, Artificial Sequence
  Description of Artificial Sequence:  siNA antisense region
cuguguuauuuuuuuucuu

SEQ ID NO: 1540 - RNA, 19 nt, Artificial Sequence
  Description of Artificial Sequence:  siNA antisense region
guucucaagucugucucuc

SEQ ID NO: 1541 - RNA, 19 nt, Artificial Sequence
  Description of Artificial Sequence:  siNA antisense region
uccgucgcaacuugucaag

SEQ ID NO: 1542 - RNA, 19 nt, Artificial Sequence
  Description of Artificial Sequence:  siNA antisense region
ggacacuucuuuuuucucu

SEQ ID NO: 1543 - RNA, 19 nt, Artificial Sequence
  Description of Artificial Sequence:  siNA antisense region
cccuuggcuuuaguucucg

SEQ ID NO: 1544 - RNA, 19 nt, Artificial Sequence
  Description of Artificial Sequence:  siNA antisense region
cccaguccaacuuggauac

SEQ ID NO: 1545 - RNA, 19 nt, Artificial Sequence
  Description of Artificial Sequence:  siNA antisense region
gggcgccgucagaccgaac

SEQ ID NO: 1546 - RNA, 19 nt, Artificial Sequence
  Description of Artificial Sequence:  siNA antisense region
cccacucgugcacacuggg

SEQ ID NO: 1547 - RNA, 19 nt, Artificial Sequence
  Description of Artificial Sequence:  siNA antisense region
gggcgcgaccaaguccuuc

SEQ ID NO: 1548 - RNA, 19 nt, Artificial Sequence
  Description of Artificial Sequence:  siNA antisense region
uggcuccacgccaagggag

SEQ ID NO: 1549 - RNA, 19 nt, Artificial Sequence
  Description of Artificial Sequence:  siNA antisense region
ccgcaggcggccgcucccu

SEQ ID NO: 1550 - RNA, 19 nt, Artificial Sequence
  Description of Artificial Sequence:  siNA antisense region
uccgcaaagcggggcagcc

SEQ ID NO: 1551 - RNA, 19 nt, Artificial Sequence
  Description of Artificial Sequence:  siNA antisense region
ucgcgcggggacagcccgu

SEQ ID NO: 1552 - RNA, 19 nt, Artificial Sequence
  Description of Artificial Sequence:  siNA antisense region
gaaaguccaacguuccguu

SEQ ID NO: 1553 - RNA, 19 nt, Artificial Sequence
  Description of Artificial Sequence:  siNA antisense region
uucuuggucaauguuaacg

SEQ ID NO: 1554 - RNA, 19 nt, Artificial Sequence
  Description of Artificial Sequence:  siNA antisense region
aauguuagguccaugcagu

SEQ ID NO: 1555 - RNA, 19 nt, Artificial Sequence
  Description of Artificial Sequence:  siNA antisense region
uaauacugaaugagaucga

SEQ ID NO: 1556 - RNA, 19 nt, Artificial Sequence
  Description of Artificial Sequence:  siNA antisense region
cccucccccuccccccuuu

SEQ ID NO: 1557 - RNA, 19 nt, Artificial Sequence
  Description of Artificial Sequence:  siNA antisense region
cuauugcaguuuguaaccc

SEQ ID NO: 1558 - RNA, 19 nt, Artificial Sequence
  Description of Artificial Sequence:  siNA antisense region
agaagcaaucuacagucuc

SEQ ID NO: 1559 - RNA, 19 nt, Artificial Sequence
  Description of Artificial Sequence:  siNA antisense region
guucuuaaggaguacuaca

SEQ ID NO: 1560 - RNA, 19 nt, Artificial Sequence
  Description of Artificial Sequence:  siNA antisense region
acccuccccccgcuuugug

SEQ ID NO: 1561 - RNA, 19 nt, Artificial Sequence
  Description of Artificial Sequence:  siNA antisense region
uccugccgccccuccccaa

SEQ ID NO: 1562 - RNA, 19 nt, Artificial Sequence
  Description of Artificial Sequence:  siNA antisense region
cgcucucacaaaccucccu

SEQ ID NO: 1563 - RNA, 19 nt, Artificial Sequence
  Description of Artificial Sequence:  siNA antisense region
caucuguaggcucagccuc

SEQ ID NO: 1564 - RNA, 19 nt, Artificial Sequence
  Description of Artificial Sequence:  siNA antisense region
agcaggccagaaagaguuc

SEQ ID NO: 1565 - RNA, 19 nt, Artificial Sequence
  Description of Artificial Sequence:  siNA antisense region
acauacacaguuaacgaaa

SEQ ID NO: 1566 - RNA, 19 nt, Artificial Sequence
  Description of Artificial Sequence:  siNA antisense region
uaaaaaauauauauaugua

SEQ ID NO: 1567 - RNA, 19 nt, Artificial Sequence
  Description of Artificial Sequence:  siNA antisense region
aaucagcuuuaaucaaauu

SEQ ID NO: 1568 - RNA, 19 nt, Artificial Sequence
  Description of Artificial Sequence:  siNA antisense region
aagcuguuuauugacagua

SEQ ID NO: 1569 - RNA, 19 nt, Artificial Sequence
  Description of Artificial Sequence:  siNA antisense region
auaacuuacaaaggcauga

SEQ ID NO: 1570 - RNA, 19 nt, Artificial Sequence
  Description of Artificial Sequence:  siNA antisense region
caaacaaacaaacaagaaa

SEQ ID NO: 1571 - RNA, 19 nt, Artificial Sequence
  Description of Artificial Sequence:  siNA antisense region
aacacugggcaggauaccc

SEQ ID NO: 1572 - RNA, 19 nt, Artificial Sequence
  Description of Artificial Sequence:  siNA antisense region
aaucucuuauuuacaaaca

SEQ ID NO: 1573 - RNA, 19 nt, Artificial Sequence
  Description of Artificial Sequence:  siNA antisense region
uaaacucagagugcuccaa

SEQ ID NO: 1574 - RNA, 19 nt, Artificial Sequence
  Description of Artificial Sequence:  siNA antisense region
auacuuuauuacaaauggu

SEQ ID NO: 1575 - RNA, 19 nt, Artificial Sequence
  Description of Artificial Sequence:  siNA antisense region
aaaacauaaaaaaauuaua

SEQ ID NO: 1576 - RNA, 19 nt, Artificial Sequence
  Description of Artificial Sequence:  siNA antisense region
ucuggaauuuucagaaaca

SEQ ID NO: 1577 - RNA, 19 nt, Artificial Sequence
  Description of Artificial Sequence:  siNA antisense region
auuuucuuaaauauccuuu

SEQ ID NO: 1578 - RNA, 19 nt, Artificial Sequence
  Description of Artificial Sequence:  siNA antisense region
uuuccaauaguuuauugua

SEQ ID NO: 1579 - RNA, 19 nt, Artificial Sequence
  Description of Artificial Sequence:  siNA antisense region
aagagguuaggggaguacu

SEQ ID NO: 1580 - RNA, 19 nt, Artificial Sequence
  Description of Artificial Sequence:  siNA antisense region
ucuacagaugaugcagaaa

SEQ ID NO: 1581 - RNA, 19 nt, Artificial Sequence
  Description of Artificial Sequence:  siNA antisense region
caccuagauagacuaggau

SEQ ID NO: 1582 - RNA, 19 nt, Artificial Sequence
  Description of Artificial Sequence:  siNA antisense region
ucuuaacucuuucaacucc

SEQ ID NO: 1583 - RNA, 19 nt, Artificial Sequence
  Description of Artificial Sequence:  siNA antisense region
agugauuuuaucgagcauu

SEQ ID NO: 1584 - RNA, 19 nt, Artificial Sequence
  Description of Artificial Sequence:  siNA antisense region
auaguaagaagcacugaga

SEQ ID NO: 1585 - RNA, 19 nt, Artificial Sequence
  Description of Artificial Sequence:  siNA antisense region
aacaguuuuuacugcuuaa

SEQ ID NO: 1586 - RNA, 19 nt, Artificial Sequence
  Description of Artificial Sequence:  siNA antisense region
uuucuaagucuaauagaga

SEQ ID NO: 1587 - RNA, 19 nt, Artificial Sequence
  Description of Artificial Sequence:  siNA antisense region
guacaucagguacauuuau

SEQ ID NO: 1588 - RNA, 19 nt, Artificial Sequence
  Description of Artificial Sequence:  siNA antisense region
agccugacauagcaucagg

SEQ ID NO: 1589 - RNA, 19 nt, Artificial Sequence
  Description of Artificial Sequence:  siNA antisense region
ggggagcguggaguaugaa

SEQ ID NO: 1590 - RNA, 19 nt, Artificial Sequence
  Description of Artificial Sequence:  siNA antisense region
uuccauauagauacgcugg

SEQ ID NO: 1591 - RNA, 19 nt, Artificial Sequence
  Description of Artificial Sequence:  siNA antisense region
cuagccuuugguaagcaau

SEQ ID NO: 1592 - RNA, 19 nt, Artificial Sequence
  Description of Artificial Sequence:  siNA antisense region
gccuccugaaacaucgcac

SEQ ID NO: 1593 - RNA, 19 nt, Artificial Sequence
  Description of Artificial Sequence:  siNA antisense region
gcaaccccccuuccuccag

SEQ ID NO: 1594 - RNA, 19 nt, Artificial Sequence
  Description of Artificial Sequence:  siNA antisense region
gggcugucccucuccacug

SEQ ID NO: 1595 - RNA, 19 nt, Artificial Sequence
  Description of Artificial Sequence:  siNA antisense region
aauguuugacuucucagug

SEQ ID NO: 1596 - RNA, 19 nt, Artificial Sequence
  Description of Artificial Sequence:  siNA antisense region
augcaauccaaacuuugaa

SEQ ID NO: 1597 - RNA, 19 nt, Artificial Sequence
  Description of Artificial Sequence:  siNA antisense region
cacagcacaugccacuuga

SEQ ID NO: 1598 - RNA, 19 nt, Artificial Sequence
  Description of Artificial Sequence:  siNA antisense region
ucuaacauuauaaaugguc

SEQ ID NO: 1599 - RNA, 19 nt, Artificial Sequence
  Description of Artificial Sequence:  siNA antisense region
agcaccuauuguaaaauuu

SEQ ID NO: 1600 - RNA, 19 nt, Artificial Sequence
  Description of Artificial Sequence:  siNA antisense region
auuccugcuuugagaauaa

SEQ ID NO: 1601 - RNA, 19 nt, Artificial Sequence
  Description of Artificial Sequence:  siNA antisense region
uuguaaaaucugccaccaa

SEQ ID NO: 1602 - RNA, 19 nt, Artificial Sequence
  Description of Artificial Sequence:  siNA antisense region
auuggaaggauacaucuuu

SEQ ID NO: 1603 - RNA, 19 nt, Artificial Sequence
  Description of Artificial Sequence:  siNA antisense region
ucaaagagaagauuccaaa

SEQ ID NO: 1604 - RNA, 19 nt, Artificial Sequence
  Description of Artificial Sequence:  siNA antisense region
cuuuuuaucuaggaauugu

SEQ ID NO: 1605 - RNA, 19 nt, Artificial Sequence
  Description of Artificial Sequence:  siNA antisense region
ucauaagacaaaggccauc

SEQ ID NO: 1606 - RNA, 19 nt, Artificial Sequence
  Description of Artificial Sequence:  siNA antisense region
gaaugcuguuauaaauauu

SEQ ID NO: 1607 - RNA, 19 nt, Artificial Sequence
  Description of Artificial Sequence:  siNA antisense region
aauacauuuauugugacag

SEQ ID NO: 1608 - RNA, 19 nt, Artificial Sequence
  Description of Artificial Sequence:  siNA antisense region
ugguauuugaauacauuua

SEQ ID NO: 1609 - RNA, 23 nt, Artificial Sequence
  Description of Artificial Sequence:  Target Sequence/siNA sense region
ggaaaaagugaaaaccuugaaag

SEQ ID NO: 1610 - RNA, 23 nt, Artificial Sequence
  Description of Artificial Sequence:  Target Sequence/siNA sense region
caacucaugcuaacgcagcaguu

SEQ ID NO: 1611 - RNA, 23 nt, Artificial Sequence
  Description of Artificial Sequence:  Target Sequence/siNA sense region
cauugaccaagaacugcauggac

SEQ ID NO: 1612 - RNA, 23 nt, Artificial Sequence
  Description of Artificial Sequence:  Target Sequence/siNA sense region
accaagaacugcauggaccuaac

SEQ ID NO: 1613 - RNA, 23 nt, Artificial Sequence
  Description of Artificial Sequence:  Target Sequence/siNA sense region
gaacugcauggaccuaacauucg

SEQ ID NO: 1614 - RNA, 23 nt, Artificial Sequence
  Description of Artificial Sequence:  Target Sequence/siNA sense region
aacugcauggaccuaacauucga

SEQ ID NO: 1615 - RNA, 23 nt, Artificial Sequence
  Description of Artificial Sequence:  Target Sequence/siNA sense region
cugcauggaccuaacauucgauc

SEQ ID NO: 1616 - RNA, 23 nt, Artificial Sequence
  Description of Artificial Sequence:  Target Sequence/siNA sense region
gcauggaccuaacauucgaucuc

SEQ ID NO: 1617 - RNA, 21 nt, Artificial Sequence
  Description of Artificial Sequence:  siNA sense region
  misc_feature (20)..(21): n stands for thymidine
aaaaagugaaaaccuugaann

SEQ ID NO: 1618 - RNA, 21 nt, Artificial Sequence
  Description of Artificial Sequence:  siNA sense region
  misc_feature (20)..(21): n stands for thymidine
acucaugcuaacgcagcagnn

SEQ ID NO: 1619 - RNA, 21 nt, Artificial Sequence
  Description of Artificial Sequence:  siNA sense region
  misc_feature (20)..(21): n stands for thymidine
uugaccaagaacugcauggnn

SEQ ID NO: 1620 - RNA, 21 nt, Artificial Sequence
  Description of Artificial Sequence:  siNA sense region
  misc_feature (20)..(21): n stands for thymidine
caagaacugcauggaccuann

SEQ ID NO: 1621 - RNA, 21 nt, Artificial Sequence
  Description of Artificial Sequence:  siNA sense region
  misc_feature (20)..(21): n stands for thymidine
acugcauggaccuaacauunn

SEQ ID NO: 1622 - RNA, 21 nt, Artificial Sequence
  Description of Artificial Sequence:  siNA sense region
  misc_feature (20)..(21): n stands for thymidine
cugcauggaccuaacauucnn

SEQ ID NO: 1623 - RNA, 21 nt, Artificial Sequence
  Description of Artificial Sequence:  siNA sense region
  misc_feature (20)..(21): n stands for thymidine
gcauggaccuaacauucgann

SEQ ID NO: 1624 - RNA, 21 nt, Artificial Sequence
  Description of Artificial Sequence:  siNA sense region
  misc_feature (20)..(21): n stands for thymidine
auggaccuaacauucgaucnn

SEQ ID NO: 1625 - RNA, 21 nt, Artificial Sequence
  Description of Artificial Sequence:  siNA antisense region
  misc_feature (20)..(21): n stands for thymidine
uucaagguuuucacuuuuunn

SEQ ID NO: 1626 - RNA, 21 nt, Artificial Sequence
  Description of Artificial Sequence:  siNA antisense region
  misc_feature (20)..(21): n stands for thymidine
cugcugcguuagcaugagunn

SEQ ID NO: 1627 - RNA, 21 nt, Artificial Sequence
  Description of Artificial Sequence:  siNA antisense region
  misc_feature (20)..(21): n stands for thymidine
ccaugcaguucuuggucaann

SEQ ID NO: 1628 - RNA, 21 nt, Artificial Sequence
  Description of Artificial Sequence:  siNA antisense region
  misc_feature (20)..(21): n stands for thymidine
uagguccaugcaguucuugnn

SEQ ID NO: 1629 - RNA, 21 nt, Artificial Sequence
  Description of Artificial Sequence:  siNA antisense region
  misc_feature (20)..(21): n stands for thymidine
aauguuagguccaugcagunn

SEQ ID NO: 1630 - RNA, 21 nt, Artificial Sequence
  Description of Artificial Sequence:  siNA antisense region
  misc_feature (20)..(21): n stands for thymidine
gaauguuagguccaugcagnn

SEQ ID NO: 1631 - RNA, 21 nt, Artificial Sequence
  Description of Artificial Sequence:  siNA antisense region
  misc_feature (20)..(21): n stands for thymidine
ucgaauguuagguccaugcnn

SEQ ID NO: 1632 - RNA, 21 nt, Artificial Sequence
  Description of Artificial Sequence:  siNA antisense region
  misc_feature (20)..(21): n stands for thymidine
gaucgaauguuagguccaunn

SEQ ID NO: 1633 - RNA, 21 nt, Artificial Sequence
  Description of Artificial Sequence:  siNA sense region
  misc_feature (1)..(1): 5'-3 attached terminal deoxyabasic moeity
  misc_feature (7)..(7): 2'-deoxy-2'-fluoro
  misc_feature (13)..(16): 2'-deoxy-2'-fluoro
  misc_feature (20)..(21): n stands for thymidine
  misc_feature (21)..(21): 3'-3 attached terminal deoxyabasic moeity
aaaaagugaaaaccuugaann

SEQ ID NO: 1634 - RNA, 21 nt, Artificial Sequence
  Description of Artificial Sequence:  siNA sense region
  misc_feature (1)..(1): 5'-3 attached terminal deoxyabasic moeity
  misc_feature (2)..(4): 2'-deoxy-2'-fluoro
  misc_feature (6)..(6): 2'-deoxy-2'-fluoro
  misc_feature (8)..(9): 2'-deoxy-2'-fluoro
  misc_feature (12)..(12): 2'-deoxy-2'-fluoro
  misc_feature (14)..(14): 2'-deoxy-2'-fluoro
  misc_feature (17)..(17): 2'-deoxy-2'-fluoro
  misc_feature (20)..(21): n stands for thymidine
  misc_feature (21)..(21): 3'-3 attached terminal deoxyabasic moeity
acucaugcuaacgcagcagnn

SEQ ID NO: 1635 - RNA, 21 nt, Artificial Sequence
  Description of Artificial Sequence:  siNA sense region
  misc_feature (1)..(2): 2'-deoxy-2'-fluoro
  misc_feature (1)..(1): 5'-3 attached terminal deoxyabasic moeity
  misc_feature (5)..(6): 2'-deoxy-2'-fluoro
  misc_feature (12)..(13): 2'-deoxy-2'-fluoro
  misc_feature (15)..(15): 2'-deoxy-2'-fluoro
  misc_feature (17)..(17): 2'-deoxy-2'-fluoro
  misc_feature (20)..(21): n stands for thymidine
  misc_feature (21)..(21): 3'-3 attached terminal deoxyabasic moeity
uugaccaagaacugcauggnn

SEQ ID NO: 1636 - RNA, 21 nt, Artificial Sequence
  Description of Artificial Sequence:  siNA sense region
  misc_feature (1)..(1): 2'-deoxy-2'-fluoro
  misc_feature (1)..(1): 5'-3 attached terminal deoxyabasic moeity
  misc_feature (7)..(8): 2'-deoxy-2'-fluoro
  misc_feature (10)..(10): 2'-deoxy-2'-fluoro
  misc_feature (12)..(12): 2'-deoxy-2'-fluoro
  misc_feature (16)..(18): 2'-deoxy-2'-fluoro
  misc_feature (20)..(21): n stands for thymidine
  misc_feature (21)..(21): 3'-3 attached terminal deoxyabasic moeity
caagaacugcauggaccuann

SEQ ID NO: 1637 - RNA, 21 nt, Artificial Sequence
  Description of Artificial Sequence:  siNA sense region
  misc_feature (1)..(1): 5'-3 attached terminal deoxyabasic moeity
  misc_feature (2)..(3): 2'-deoxy-2'-fluoro
  misc_feature (5)..(5): 2'-deoxy-2'-fluoro
  misc_feature (7)..(7): 2'-deoxy-2'-fluoro
  misc_feature (11)..(13): 2'-deoxy-2'-fluoro
  misc_feature (16)..(16): 2'-deoxy-2'-fluoro
  misc_feature (18)..(19): 2'-deoxy-2'-fluoro
  misc_feature (20)..(21): n stands for thymidine
  misc_feature (21)..(21): 3'-3 attached terminal deoxyabasic moeity
acugcauggaccuaacauunn

SEQ ID NO: 1638 - RNA, 21 nt, Artificial Sequence
  Description of Artificial Sequence:  siNA sense region
  misc_feature (1)..(2): 2'-deoxy-2'-fluoro
  misc_feature (1)..(1): 5'-3 attached terminal deoxyabasic moeity
  misc_feature (4)..(4): 2'-deoxy-2'-fluoro
  misc_feature (6)..(6): 2'-deoxy-2'-fluoro
  misc_feature (10)..(12): 2'-deoxy-2'-fluoro
  misc_feature (15)..(15): 2'-deoxy-2'-fluoro
  misc_feature (17)..(19): 2'-deoxy-2'-fluoro
  misc_feature (20)..(21): n stands for thymidine
  misc_feature (21)..(21): 3'-3 attached terminal deoxyabasic moeity
cugcauggaccuaacauucnn

SEQ ID NO: 1639 - RNA, 21 nt, Artificial Sequence
  Description of Artificial Sequence:  siNA sense region
  misc_feature (1)..(1): 5'-3 attached terminal deoxyabasic moeity
  misc_feature (2)..(2): 2'-deoxy-2'-fluoro
  misc_feature (4)..(4): 2'-deoxy-2'-fluoro
  misc_feature (8)..(10): 2'-deoxy-2'-fluoro
  misc_feature (13)..(13): 2'-deoxy-2'-fluoro
  misc_feature (15)..(17): 2'-deoxy-2'-fluoro
  misc_feature (20)..(21): n stands for thymidine
  misc_feature (21)..(21): 3'-3 attached terminal deoxyabasic moeity
gcauggaccuaacauucgann

SEQ ID NO: 1640 - RNA, 21 nt, Artificial Sequence
  Description of Artificial Sequence:  siNA sense region
  misc_feature (1)..(1): 5'-3 attached terminal deoxyabasic moeity
  misc_feature (2)..(2): 2'-deoxy-2'-fluoro
  misc_feature (6)..(8): 2'-deoxy-2'-fluoro
  misc_feature (11)..(11): 2'-deoxy-2'-fluoro
  misc_feature (13)..(15): 2'-deoxy-2'-fluoro
  misc_feature (18)..(19): 2'-deoxy-2'-fluoro
  misc_feature (20)..(21): n stands for thymidine
  misc_feature (21)..(21): 3'-3 attached terminal deoxyabasic moeity
auggaccuaacauucgaucnn

SEQ ID NO: 1641 - RNA, 21 nt, Artificial Sequence
  Description of Artificial Sequence:  siNA antisense region
  misc_feature (1)..(3): 2'-deoxy-2'-fluoro
  misc_feature (8)..(12): 2'-deoxy-2'-fluoro
  misc_feature (14)..(19): 2'-deoxy-2'-fluoro
  misc_feature (20)..(21): n stands for thymidine
  misc_feature (20)..(20): Phosphorothioate 3'-Internucleotide Linkage
uucaagguuuucacuuuuunn

SEQ ID NO: 1642 - RNA, 21 nt, Artificial Sequence
  Description of Artificial Sequence:  siNA antisense region
  misc_feature (1)..(2): 2'-deoxy-2'-fluoro
  misc_feature (4)..(5): 2'-deoxy-2'-fluoro
  misc_feature (7)..(7): 2'-deoxy-2'-fluoro
  misc_feature (9)..(10): 2'-deoxy-2'-fluoro
  misc_feature (13)..(13): 2'-deoxy-2'-fluoro
  misc_feature (15)..(15): 2'-deoxy-2'-fluoro
  misc_feature (19)..(19): 2'-deoxy-2'-fluoro
  misc_feature (20)..(21): n stands for thymidine
  misc_feature (20)..(20): Phosphorothioate 3'-Internucleotide Linkage
cugcugcguuagcaugagunn

SEQ ID NO: 1643 - RNA, 21 nt, Artificial Sequence
  Description of Artificial Sequence:  siNA antisense region
  misc_feature (1)..(2): 2'-deoxy-2'-fluoro
  misc_feature (4)..(4): 2'-deoxy-2'-fluoro
  misc_feature (6)..(6): 2'-deoxy-2'-fluoro
  misc_feature (9)..(13): 2'-deoxy-2'-fluoro
  misc_feature (16)..(17): 2'-deoxy-2'-fluoro
  misc_feature (20)..(21): n stands for thymidine
  misc_feature (20)..(20): Phosphorothioate 3'-Internucleotide Linkage
ccaugcaguucuuggucaann

SEQ ID NO: 1644 - RNA, 21 nt, Artificial Sequence
  Description of Artificial Sequence:  siNA antisense region
  misc_feature (1)..(1): 2'-deoxy-2'-fluoro
  misc_feature (5)..(7): 2'-deoxy-2'-fluoro
  misc_feature (9)..(9): 2'-deoxy-2'-fluoro
  misc_feature (11)..(11): 2'-deoxy-2'-fluoro
  misc_feature (14)..(18): 2'-deoxy-2'-fluoro
  misc_feature (20)..(21): n stands for thymidine
  misc_feature (20)..(20): Phosphorothioate 3'-Internucleotide Linkage
uagguccaugcaguucuugnn

SEQ ID NO: 1645 - RNA, 21 nt, Artificial Sequence
  Description of Artificial Sequence:  siNA antisense region
  misc_feature (3)..(3): 2'-deoxy-2'-fluoro
  misc_feature (5)..(6): 2'-deoxy-2'-fluoro
  misc_feature (10)..(12): 2'-deoxy-2'-fluoro
  misc_feature (14)..(14): 2'-deoxy-2'-fluoro
  misc_feature (16)..(16): 2'-deoxy-2'-fluoro
  misc_feature (19)..(19): 2'-deoxy-2'-fluoro
  misc_feature (20)..(21): n stands for thymidine
  misc_feature (20)..(20): Phosphorothioate 3'-Internucleotide Linkage
aauguuagguccaugcagunn

SEQ ID NO: 1646 - RNA, 21 nt, Artificial Sequence
  Description of Artificial Sequence:  siNA antisense region
  misc_feature (4)..(4): 2'-deoxy-2'-fluoro
  misc_feature (6)..(7): 2'-deoxy-2'-fluoro
  misc_feature (11)..(13): 2'-deoxy-2'-fluoro
  misc_feature (15)..(15): 2'-deoxy-2'-fluoro
  misc_feature (17)..(17): 2'-deoxy-2'-fluoro
  misc_feature (20)..(21): n stands for thymidine
  misc_feature (20)..(20): Phosphorothioate 3'-Internucleotide Linkage
gaauguuagguccaugcagnn

SEQ ID NO: 1647 - RNA, 21 nt, Artificial Sequence
  Description of Artificial Sequence:  siNA antisense region
  misc_feature (1)..(2): 2'-deoxy-2'-fluoro
  misc_feature (6)..(6): 2'-deoxy-2'-fluoro
  misc_feature (8)..(9): 2'-deoxy-2'-fluoro
  misc_feature (13)..(15): 2'-deoxy-2'-fluoro
  misc_feature (17)..(17): 2'-deoxy-2'-fluoro
  misc_feature (19)..(19): 2'-deoxy-2'-fluoro
  misc_feature (20)..(21): n stands for thymidine
  misc_feature (20)..(20): Phosphorothioate 3'-Internucleotide Linkage
ucgaauguuagguccaugcnn

SEQ ID NO: 1648 - RNA, 21 nt, Artificial Sequence
  Description of Artificial Sequence:  siNA antisense region
  misc_feature (3)..(4): 2'-deoxy-2'-fluoro
  misc_feature (8)..(8): 2'-deoxy-2'-fluoro
  misc_feature (10)..(11): 2'-deoxy-2'-fluoro
  misc_feature (15)..(17): 2'-deoxy-2'-fluoro
  misc_feature (19)..(19): 2'-deoxy-2'-fluoro
  misc_feature (20)..(21): n stands for thymidine
  misc_feature (20)..(20): Phosphorothioate 3'-Internucleotide Linkage
gaucgaauguuagguccaunn

SEQ ID NO: 1649 - RNA, 21 nt, Artificial Sequence
  Description of Artificial Sequence:  siNA sense region
  misc_feature (1)..(6): 2'-deoxy
  misc_feature (1)..(1): 5'-3 attached terminal deoxyabasic moeity
  misc_feature (7)..(7): 2'-deoxy-2'-fluoro
  misc_feature (8)..(12): 2'-deoxy
  misc_feature (13)..(16): 2'-deoxy-2'-fluoro
  misc_feature (17)..(19): 2'-deoxy
  misc_feature (20)..(21): n stands for thymidine
  misc_feature (21)..(21): 3'-3 attached terminal deoxyabasic moeity
aaaaagugaaaaccuugaann

SEQ ID NO: 1650 - RNA, 21 nt, Artificial Sequence
  Description of Artificial Sequence:  siNA sense region
  misc_feature (1)..(1): 2'-deoxy
  misc_feature (1)..(1): 5'-3 attached terminal deoxyabasic moeity
  misc_feature (2)..(4): 2'-deoxy-2'-fluoro
  misc_feature (5)..(5): 2'-deoxy
  misc_feature (6)..(6): 2'-deoxy-2'-fluoro
  misc_feature (7)..(7): 2'-deoxy
  misc_feature (8)..(9): 2'-deoxy-2'-fluoro
  misc_feature (10)..(11): 2'-deoxy
  misc_feature (12)..(12): 2'-deoxy-2'-fluoro
  misc_feature (13)..(13): 2'-deoxy
  misc_feature (14)..(14): 2'-deoxy-2'-fluoro
  misc_feature (15)..(16): 2'-deoxy
  misc_feature (17)..(17): 2'-deoxy-2'-fluoro
  misc_feature (18)..(19): 2'-deoxy
  misc_feature (20)..(21): n stands for thymidine
  misc_feature (21)..(21): 3'-3 attached terminal deoxyabasic moeity
acucaugcuaacgcagcagnn

SEQ ID NO: 1651 - RNA, 21 nt, Artificial Sequence
  Description of Artificial Sequence:  siNA sense region
  misc_feature (1)..(2): 2'-deoxy-2'-fluoro
  misc_feature (1)..(1): 5'-3 attached terminal deoxyabasic moeity
  misc_feature (3)..(4): 2'-deoxy
  misc_feature (5)..(6): 2'-deoxy-2'-fluoro
  misc_feature (7)..(11): 2'-deoxy
  misc_feature (12)..(13): 2'-deoxy-2'-fluoro
  misc_feature (14)..(14): 2'-deoxy
  misc_feature (15)..(15): 2'-deoxy-2'-fluoro
  misc_feature (16)..(16): 2'-deoxy
  misc_feature (17)..(17): 2'-deoxy-2'-fluoro
  misc_feature (18)..(19): 2'-deoxy
  misc_feature (20)..(21): n stands for thymidine
  misc_feature (21)..(21): 3'-3 attached terminal deoxyabasic moeity
uugaccaagaacugcauggnn

SEQ ID NO: 1652 - RNA, 21 nt, Artificial Sequence
  Description of Artificial Sequence:  siNA sense region
  misc_feature (1)..(1): 2'-deoxy-2'-fluoro
  misc_feature (1)..(1): 5'-3 attached terminal deoxyabasic moeity
  misc_feature (2)..(6): 2'-deoxy
  misc_feature (7)..(8): 2'-deoxy-2'-fluoro
  misc_feature (9)..(9): 2'-deoxy
  misc_feature (10)..(10): 2'-deoxy-2'-fluoro
  misc_feature (11)..(11): 2'-deoxy
  misc_feature (12)..(12): 2'-deoxy-2'-fluoro
  misc_feature (13)..(15): 2'-deoxy
  misc_feature (16)..(18): 2'-deoxy-2'-fluoro
  misc_feature (19)..(19): 2'-deoxy
  misc_feature (20)..(21): n stands for thymidine
  misc_feature (21)..(21): 3'-3 attached terminal deoxyabasic moeity
caagaacugcauggaccuann

SEQ ID NO: 1653 - RNA, 21 nt, Artificial Sequence
  Description of Artificial Sequence:  siNA sense region
  misc_feature (1)..(1): 2'-deoxy
  misc_feature (1)..(1): 5'-3 attached terminal deoxyabasic moeity
  misc_feature (2)..(3): 2'-deoxy-2'-fluoro
  misc_feature (4)..(4): 2'-deoxy
  misc_feature (5)..(5): 2'-deoxy-2'-fluoro
  misc_feature (6)..(6): 2'-deoxy
  misc_feature (7)..(7): 2'-deoxy-2'-fluoro
  misc_feature (8)..(10): 2'-deoxy
  misc_feature (11)..(13): 2'-deoxy-2'-fluoro
  misc_feature (14)..(15): 2'-deoxy
  misc_feature (16)..(16): 2'-deoxy-2'-fluoro
  misc_feature (17)..(17): 2'-deoxy
  misc_feature (18)..(19): 2'-deoxy-2'-fluoro
  misc_feature (20)..(21): n stands for thymidine
  misc_feature (21)..(21): 3'-3 attached terminal deoxyabasic moeity
acugcauggaccuaacauunn

SEQ ID NO: 1654 - RNA, 21 nt, Artificial Sequence
  Description of Artificial Sequence:  siNA sense region
  misc_feature (1)..(2): 2'-deoxy-2'-fluoro
  misc_feature (1)..(1): 5'-3 attached terminal deoxyabasic moeity
  misc_feature (3)..(3): 2'-deoxy
  misc_feature (4)..(4): 2'-deoxy-2'-fluoro
  misc_feature (5)..(5): 2'-deoxy
  misc_feature (6)..(6): 2'-deoxy-2'-fluoro
  misc_feature (7)..(9): 2'-deoxy
  misc_feature (10)..(12): 2'-deoxy-2'-fluoro
  misc_feature (13)..(14): 2'-deoxy
  misc_feature (15)..(15): 2'-deoxy-2'-fluoro
  misc_feature (16)..(16): 2'-deoxy
  misc_feature (17)..(19): 2'-deoxy-2'-fluoro
  misc_feature (20)..(21): n stands for thymidine
  misc_feature (21)..(21): 3'-3 attached terminal deoxyabasic moeity
cugcauggaccuaacauucnn

SEQ ID NO: 1655 - RNA, 21 nt, Artificial Sequence
  Description of Artificial Sequence:  siNA sense region
  misc_feature (1)..(1): 2'-deoxy
  misc_feature (1)..(1): 5'-3 attached terminal deoxyabasic moeity
  misc_feature (2)..(2): 2'-deoxy-2'-fluoro
  misc_feature (3)..(3): 2'-deoxy
  misc_feature (4)..(4): 2'-deoxy-2'-fluoro
  misc_feature (5)..(7): 2'-deoxy
  misc_feature (8)..(10): 2'-deoxy-2'-fluoro
  misc_feature (11)..(12): 2'-deoxy
  misc_feature (13)..(13): 2'-deoxy-2'-fluoro
  misc_feature (14)..(14): 2'-deoxy
  misc_feature (15)..(17): 2'-deoxy-2'-fluoro
  misc_feature (18)..(19): 2'-deoxy
  misc_feature (20)..(21): n stands for thymidine
  misc_feature (21)..(21): 3'-3 attached terminal deoxyabasic moeity
gcauggaccuaacauucgann

SEQ ID NO: 1656 - RNA, 21 nt, Artificial Sequence
  Description of Artificial Sequence:  siNA sense region
  misc_feature (1)..(1): 2'-deoxy
  misc_feature (1)..(1): 5'-3 attached terminal deoxyabasic moeity
  misc_feature (2)..(2): 2'-deoxy-2'-fluoro
  misc_feature (3)..(5): 2'-deoxy
  misc_feature (6)..(8): 2'-deoxy-2'-fluoro
  misc_feature (9)..(10): 2'-deoxy
  misc_feature (11)..(11): 2'-deoxy-2'-fluoro
  misc_feature (12)..(12): 2'-deoxy
  misc_feature (13)..(15): 2'-deoxy-2'-fluoro
  misc_feature (16)..(17): 2'-deoxy
  misc_feature (18)..(19): 2'-deoxy-2'-fluoro
  misc_feature (20)..(21): n stands for thymidine
  misc_feature (21)..(21): 3'-3 attached terminal deoxyabasic moeity
auggaccuaacauucgaucnn

SEQ ID NO: 1657 - RNA, 21 nt, Artificial Sequence
  Description of Artificial Sequence:  siNA antisense region
  misc_feature (1)..(3): 2'-deoxy-2'-fluoro
  misc_feature (4)..(7): 2'-deoxy
  misc_feature (8)..(12): 2'-deoxy-2'-fluoro
  misc_feature (13)..(13): 2'-deoxy
  misc_feature (14)..(19): 2'-deoxy-2'-fluoro
  misc_feature (20)..(21): n stands for thymidine
  misc_feature (20)..(20): Phosphorothioate 3'-Internucleotide Linkage
uucaagguuuucacuuuuunn

SEQ ID NO: 1658 - RNA, 21 nt, Artificial Sequence
  Description of Artificial Sequence:  siNA antisense region
  misc_feature (1)..(2): 2'-deoxy-2'-fluoro
  misc_feature (3)..(3): 2'-deoxy
  misc_feature (4)..(5): 2'-deoxy-2'-fluoro
  misc_feature (6)..(6): 2'-deoxy
  misc_feature (7)..(7): 2'-deoxy-2'-fluoro
  misc_feature (8)..(8): 2'-deoxy
  misc_feature (9)..(10): 2'-deoxy-2'-fluoro
  misc_feature (11)..(12): 2'-deoxy
  misc_feature (13)..(13): 2'-deoxy-2'-fluoro
  misc_feature (14)..(14): 2'-deoxy
  misc_feature (15)..(15): 2'-deoxy-2'-fluoro
  misc_feature (16)..(18): 2'-deoxy
  misc_feature (19)..(19): 2'-deoxy-2'-fluoro
  misc_feature (20)..(21): n stands for thymidine
  misc_feature (20)..(20): Phosphorothioate 3'-Internucleotide Linkage
cugcugcguuagcaugagunn

SEQ ID NO: 1659 - RNA, 21 nt, Artificial Sequence
  Description of Artificial Sequence:  siNA antisense region
  misc_feature (1)..(2): 2'-deoxy-2'-fluoro
  misc_feature (3)..(3): 2'-deoxy
  misc_feature (4)..(4): 2'-deoxy-2'-fluoro
  misc_feature (5)..(5): 2'-deoxy
  misc_feature (6)..(6): 2'-deoxy-2'-fluoro
  misc_feature (7)..(8): 2'-deoxy
  misc_feature (9)..(13): 2'-deoxy-2'-fluoro
  misc_feature (14)..(15): 2'-deoxy
  misc_feature (16)..(17): 2'-deoxy-2'-fluoro
  misc_feature (18)..(19): 2'-deoxy
  misc_feature (20)..(21): n stands for thymidine
  misc_feature (20)..(20): Phosphorothioate 3'-Internucleotide Linkage
ccaugcaguucuuggucaann

SEQ ID NO: 1660 - RNA, 21 nt, Artificial Sequence
  Description of Artificial Sequence:  siNA antisense region
  misc_feature (1)..(1): 2'-deoxy-2'-fluoro
  misc_feature (2)..(4): 2'-deoxy
  misc_feature (5)..(7): 2'-deoxy-2'-fluoro
  misc_feature (8)..(8): 2'-deoxy
  misc_feature (9)..(9): 2'-deoxy-2'-fluoro
  misc_feature (10)..(10): 2'-deoxy
  misc_feature (11)..(11): 2'-deoxy-2'-fluoro
  misc_feature (12)..(13): 2'-deoxy
  misc_feature (14)..(18): 2'-deoxy-2'-fluoro
  misc_feature (19)..(19): 2'-deoxy
  misc_feature (20)..(21): n stands for thymidine
  misc_feature (20)..(20): Phosphorothioate 3'-Internucleotide Linkage
uagguccaugcaguucuugnn

SEQ ID NO: 1661 - RNA, 21 nt, Artificial Sequence
  Description of Artificial Sequence:  siNA antisense region
  misc_feature (1)..(2): 2'-deoxy
  misc_feature (3)..(3): 2'-deoxy-2'-fluoro
  misc_feature (4)..(4): 2'-deoxy
  misc_feature (5)..(6): 2'-deoxy-2'-fluoro
  misc_feature (7)..(9): 2'-deoxy
  misc_feature (10)..(12): 2'-deoxy-2'-fluoro
  misc_feature (13)..(13): 2'-deoxy
  misc_feature (14)..(14): 2'-deoxy-2'-fluoro
  misc_feature (15)..(15): 2'-deoxy
  misc_feature (16)..(16): 2'-deoxy-2'-fluoro
  misc_feature (17)..(18): 2'-deoxy
  misc_feature (19)..(19): 2'-deoxy-2'-fluoro
  misc_feature (20)..(21): n stands for thymidine
  misc_feature (20)..(20): Phosphorothioate 3'-Internucleotide Linkage
aauguuagguccaugcagunn

SEQ ID NO: 1662 - RNA, 21 nt, Artificial Sequence
  Description of Artificial Sequence:  siNA antisense region
  misc_feature (1)..(3): 2'-deoxy
  misc_feature (4)..(4): 2'-deoxy-2'-fluoro
  misc_feature (5)..(5): 2'-deoxy
  misc_feature (6)..(7): 2'-deoxy-2'-fluoro
  misc_feature (8)..(10): 2'-deoxy
  misc_feature (11)..(13): 2'-deoxy-2'-fluoro
  misc_feature (14)..(14): 2'-deoxy
  misc_feature (15)..(15): 2'-deoxy-2'-fluoro
  misc_feature (16)..(16): 2'-deoxy
  misc_feature (17)..(17): 2'-deoxy-2'-fluoro
  misc_feature (18)..(19): 2'-deoxy
  misc_feature (20)..(21): n stands for thymidine
  misc_feature (20)..(20): Phosphorothioate 3'-Internucleotide Linkage
gaauguuagguccaugcagnn

SEQ ID NO: 1663 - RNA, 21 nt, Artificial Sequence
  Description of Artificial Sequence:  siNA antisense region
  misc_feature (1)..(2): 2'-deoxy-2'-fluoro
  misc_feature (3)..(5): 2'-deoxy
  misc_feature (6)..(6): 2'-deoxy-2'-fluoro
  misc_feature (7)..(7): 2'-deoxy
  misc_feature (8)..(9): 2'-deoxy-2'-fluoro
  misc_feature (10)..(12): 2'-deoxy
  misc_feature (13)..(15): 2'-deoxy-2'-fluoro
  misc_feature (16)..(16): 2'-deoxy
  misc_feature (17)..(17): 2'-deoxy-2'-fluoro
  misc_feature (18)..(18): 2'-deoxy
  misc_feature (19)..(19): 2'-deoxy-2'-fluoro
  misc_feature (20)..(21): n stands for thymidine
  misc_feature (20)..(20): Phosphorothioate 3'-Internucleotide Linkage
ucgaauguuagguccaugcnn

SEQ ID NO: 1664 - RNA, 21 nt, Artificial Sequence
  Description of Artificial Sequence:  siNA antisense region
  misc_feature (1)..(2): 2'-deoxy
  misc_feature (3)..(4): 2'-deoxy-2'-fluoro
  misc_feature (5)..(7): 2'-deoxy
  misc_feature (8)..(8): 2'-deoxy-2'-fluoro
  misc_feature (9)..(9): 2'-deoxy
  misc_feature (10)..(11): 2'-deoxy-2'-fluoro
  misc_feature (12)..(14): 2'-deoxy
  misc_feature (15)..(17): 2'-deoxy-2'-fluoro
  misc_feature (18)..(18): 2'-deoxy
  misc_feature (19)..(19): 2'-deoxy-2'-fluoro
  misc_feature (20)..(21): n stands for thymidine
  misc_feature (20)..(20): Phosphorothioate 3'-Internucleotide Linkage
gaucgaauguuagguccaunn

SEQ ID NO: 1665 - RNA, 21 nt, Artificial Sequence
  Description of Artificial Sequence:  siNA sense region
  misc_feature (1)..(6): 2'-O-methyl
  misc_feature (7)..(7): 2'-deoxy-2'-fluoro
  misc_feature (8)..(12): 2'-O-methyl
  misc_feature (13)..(16): 2'-deoxy-2'-fluoro
  misc_feature (17)..(19): 2'-O-methyl
  misc_feature (20)..(21): n stands for thymidine
  misc_feature (20)..(20): Phosphorothioate 3'-Internucleotide Linkage
aaaaagugaaaaccuugaann

SEQ ID NO: 1666 - RNA, 21 nt, Artificial Sequence
  Description of Artificial Sequence:  siNA sense region
  misc_feature (1)..(1): 2'-O-methyl
  misc_feature (2)..(4): 2'-deoxy-2'-fluoro
  misc_feature (5)..(5): 2'-O-methyl
  misc_feature (6)..(6): 2'-deoxy-2'-fluoro
  misc_feature (7)..(7): 2'-O-methyl
  misc_feature (8)..(9): 2'-deoxy-2'-fluoro
  misc_feature (10)..(11): 2'-O-methyl
  misc_feature (12)..(12): 2'-deoxy-2'-fluoro
  misc_feature (13)..(13): 2'-O-methyl
  misc_feature (14)..(14): 2'-deoxy-2'-fluoro
  misc_feature (15)..(16): 2'-O-methyl
  misc_feature (17)..(17): 2'-deoxy-2'-fluoro
  misc_feature (18)..(19): 2'-O-methyl
  misc_feature (20)..(21): n stands for thymidine
  misc_feature (20)..(20): Phosphorothioate 3'-Internucleotide Linkage
acucaugcuaacgcagcagnn

SEQ ID NO: 1667 - RNA, 21 nt, Artificial Sequence
  Description of Artificial Sequence:  siNA sense region
  misc_feature (1)..(2): 2'-deoxy-2'-fluoro
  misc_feature (3)..(4): 2'-O-methyl
  misc_feature (5)..(6): 2'-deoxy-2'-fluoro
  misc_feature (7)..(11): 2'-O-methyl
  misc_feature (12)..(13): 2'-deoxy-2'-fluoro
  misc_feature (14)..(14): 2'-O-methyl
  misc_feature (15)..(15): 2'-deoxy-2'-fluoro
  misc_feature (16)..(16): 2'-O-methyl
  misc_feature (17)..(17): 2'-deoxy-2'-fluoro
  misc_feature (18)..(19): 2'-O-methyl
  misc_feature (20)..(21): n stands for thymidine
  misc_feature (20)..(20): Phosphorothioate 3'-Internucleotide Linkage
uugaccaagaacugcauggnn

SEQ ID NO: 1668 - RNA, 21 nt, Artificial Sequence
  Description of Artificial Sequence:  siNA sense region
  misc_feature (1)..(1): 2'-deoxy-2'-fluoro
  misc_feature (2)..(6): 2'-O-methyl
  misc_feature (7)..(8): 2'-deoxy-2'-fluoro
  misc_feature (9)..(9): 2'-O-methyl
  misc_feature (10)..(10): 2'-deoxy-2'-fluoro
  misc_feature (11)..(11): 2'-O-methyl
  misc_feature (12)..(12): 2'-deoxy-2'-fluoro
  misc_feature (13)..(15): 2'-O-methyl
  misc_feature (16)..(18): 2'-deoxy-2'-fluoro
  misc_feature (19)..(19): 2'-O-methyl
  misc_feature (20)..(21): n stands for thymidine
  misc_feature (20)..(20): Phosphorothioate 3'-Internucleotide Linkage
caagaacugcauggaccuann

SEQ ID NO: 1669 - RNA, 21 nt, Artificial Sequence
  Description of Artificial Sequence:  siNA sense region
  misc_feature (1)..(1): 2'-O-methyl
  misc_feature (2)..(3): 2'-deoxy-2'-fluoro
  misc_feature (4)..(4): 2'-O-methyl
  misc_feature (5)..(5): 2'-deoxy-2'-fluoro
  misc_feature (6)..(6): 2'-O-methyl
  misc_feature (7)..(7): 2'-deoxy-2'-fluoro
  misc_feature (8)..(10): 2'-O-methyl
  misc_feature (11)..(13): 2'-deoxy-2'-fluoro
  misc_feature (14)..(15): 2'-O-methyl
  misc_feature (16)..(16): 2'-deoxy-2'-fluoro
  misc_feature (17)..(17): 2'-O-methyl
  misc_feature (18)..(19): 2'-deoxy-2'-fluoro
  misc_feature (20)..(21): n stands for thymidine
  misc_feature (20)..(20): Phosphorothioate 3'-Internucleotide Linkage
acugcauggaccuaacauunn

SEQ ID NO: 1670 - RNA, 21 nt, Artificial Sequence
  Description of Artificial Sequence:  siNA sense region
  misc_feature (1)..(2): 2'-deoxy-2'-fluoro
  misc_feature (3)..(3): 2'-O-methyl
  misc_feature (4)..(4): 2'-deoxy-2'-fluoro
  misc_feature (5)..(5): 2'-O-methyl
  misc_feature (6)..(6): 2'-deoxy-2'-fluoro
  misc_feature (7)..(9): 2'-O-methyl
  misc_feature (10)..(12): 2'-deoxy-2'-fluoro
  misc_feature (13)..(14): 2'-O-methyl
  misc_feature (15)..(15): 2'-deoxy-2'-fluoro
  misc_feature (16)..(16): 2'-O-methyl
  misc_feature (17)..(19): 2'-deoxy-2'-fluoro
  misc_feature (20)..(21): n stands for thymidine
  misc_feature (20)..(20): Phosphorothioate 3'-Internucleotide Linkage
cugcauggaccuaacauucnn

SEQ ID NO: 1671 - RNA, 21 nt, Artificial Sequence
  Description of Artificial Sequence:  siNA sense region
  misc_feature (1)..(1): 2'-O-methyl
  misc_feature (2)..(2): 2'-deoxy-2'-fluoro
  misc_feature (3)..(3): 2'-O-methyl
  misc_feature (4)..(4): 2'-deoxy-2'-fluoro
  misc_feature (5)..(7): 2'-O-methyl
  misc_feature (8)..(10): 2'-deoxy-2'-fluoro
  misc_feature (11)..(12): 2'-O-methyl
  misc_feature (13)..(13): 2'-deoxy-2'-fluoro
  misc_feature (14)..(14): 2'-O-methyl
  misc_feature (15)..(17): 2'-deoxy-2'-fluoro
  misc_feature (18)..(19): 2'-O-methyl
  misc_feature (20)..(21): n stands for thymidine
  misc_feature (20)..(20): Phosphorothioate 3'-Internucleotide Linkage
gcauggaccuaacauucgann

SEQ ID NO: 1672 - RNA, 21 nt, Artificial Sequence
  Description of Artificial Sequence:  siNA sense region
  misc_feature (1)..(1): 2'-O-methyl
  misc_feature (2)..(2): 2'-deoxy-2'-fluoro
  misc_feature (3)..(5): 2'-O-methyl
  misc_feature (6)..(8): 2'-deoxy-2'-fluoro
  misc_feature (9)..(10): 2'-O-methyl
  misc_feature (11)..(11): 2'-deoxy-2'-fluoro
  misc_feature (12)..(12): 2'-O-methyl
  misc_feature (13)..(15): 2'-deoxy-2'-fluoro
  misc_feature (16)..(17): 2'-O-methyl
  misc_feature (18)..(19): 2'-deoxy-2'-fluoro
  misc_feature (20)..(21): n stands for thymidine
  misc_feature (20)..(20): Phosphorothioate 3'-Internucleotide Linkage
auggaccuaacauucgaucnn

SEQ ID NO: 1673 - RNA, 21 nt, Artificial Sequence
  Description of Artificial Sequence:  siNA antisense region
  misc_feature (1)..(3): 2'-deoxy-2'-fluoro
  misc_feature (4)..(7): 2'-O-methyl
  misc_feature (8)..(12): 2'-deoxy-2'-fluoro
  misc_feature (13)..(13): 2'-O-methyl
  misc_feature (14)..(19): 2'-deoxy-2'-fluoro
  misc_feature (20)..(21): n stands for thymidine
  misc_feature (20)..(20): Phosphorothioate 3'-Internucleotide Linkage
uucaagguuuucacuuuuunn

SEQ ID NO: 1674 - RNA, 21 nt, Artificial Sequence
  Description of Artificial Sequence:  siNA antisense region
  misc_feature (1)..(2): 2'-deoxy-2'-fluoro
  misc_feature (3)..(3): 2'-O-methyl
  misc_feature (4)..(5): 2'-deoxy-2'-fluoro
  misc_feature (6)..(6): 2'-O-methyl
  misc_feature (7)..(7): 2'-deoxy-2'-fluoro
  misc_feature (8)..(8): 2'-O-methyl
  misc_feature (9)..(10): 2'-deoxy-2'-fluoro
  misc_feature (11)..(12): 2'-O-methyl
  misc_feature (13)..(13): 2'-deoxy-2'-fluoro
  misc_feature (14)..(14): 2'-O-methyl
  misc_feature (15)..(15): 2'-deoxy-2'-fluoro
  misc_feature (16)..(18): 2'-O-methyl
  misc_feature (19)..(19): 2'-deoxy-2'-fluoro
  misc_feature (20)..(21): n stands for thymidine
  misc_feature (20)..(20): Phosphorothioate 3'-Internucleotide Linkage
cugcugcguuagcaugagunn

SEQ ID NO: 1675 - RNA, 21 nt, Artificial Sequence
  Description of Artificial Sequence:  siNA antisense region
  misc_feature (1)..(2): 2'-deoxy-2'-fluoro
  misc_feature (3)..(3): 2'-O-methyl
  misc_feature (4)..(4): 2'-deoxy-2'-fluoro
  misc_feature (5)..(5): 2'-O-methyl
  misc_feature (6)..(6): 2'-deoxy-2'-fluoro
  misc_feature (7)..(8): 2'-O-methyl
  misc_feature (9)..(13): 2'-deoxy-2'-fluoro
  misc_feature (14)..(15): 2'-O-methyl
  misc_feature (16)..(17): 2'-deoxy-2'-fluoro
  misc_feature (18)..(19): 2'-O-methyl
  misc_feature (20)..(21): n stands for thymidine
  misc_feature (20)..(20): Phosphorothioate 3'-Internucleotide Linkage
ccaugcaguucuuggucaann

SEQ ID NO: 1676 - RNA, 21 nt, Artificial Sequence
  Description of Artificial Sequence:  siNA antisense region
  misc_feature (1)..(1): 2'-deoxy-2'-fluoro
  misc_feature (2)..(4): 2'-O-methyl
  misc_feature (5)..(7): 2'-deoxy-2'-fluoro
  misc_feature (8)..(8): 2'-O-methyl
  misc_feature (9)..(9): 2'-deoxy-2'-fluoro
  misc_feature (10)..(10): 2'-O-methyl
  misc_feature (11)..(11): 2'-deoxy-2'-fluoro
  misc_feature (12)..(13): 2'-O-methyl
  misc_feature (14)..(18): 2'-deoxy-2'-fluoro
  misc_feature (19)..(19): 2'-O-methyl
  misc_feature (20)..(21): n stands for thymidine
  misc_feature (20)..(20): Phosphorothioate 3'-Internucleotide Linkage
uagguccaugcaguucuugnn

SEQ ID NO: 1677 - RNA, 21 nt, Artificial Sequence
  Description of Artificial Sequence:  siNA antisense region
  misc_feature (1)..(2): 2'-O-methyl
  misc_feature (3)..(3): 2'-deoxy-2'-fluoro
  misc_feature (4)..(4): 2'-O-methyl
  misc_feature (5)..(6): 2'-deoxy-2'-fluoro
  misc_feature (7)..(9): 2'-O-methyl
  misc_feature (10)..(12): 2'-deoxy-2'-fluoro
  misc_feature (13)..(13): 2'-O-methyl
  misc_feature (14)..(14): 2'-deoxy-2'-fluoro
  misc_feature (15)..(15): 2'-O-methyl
  misc_feature (16)..(16): 2'-deoxy-2'-fluoro
  misc_feature (17)..(18): 2'-O-methyl
  misc_feature (19)..(19): 2'-deoxy-2'-fluoro
  misc_feature (20)..(21): n stands for thymidine
  misc_feature (20)..(20): Phosphorothioate 3'-Internucleotide Linkage
aauguuagguccaugcagunn

SEQ ID NO: 1678 - RNA, 21 nt, Artificial Sequence
  Description of Artificial Sequence:  siNA antisense region
  misc_feature (1)..(3): 2'-O-methyl
  misc_feature (4)..(4): 2'-deoxy-2'-fluoro
  misc_feature (5)..(5): 2'-O-methyl
  misc_feature (6)..(7): 2'-deoxy-2'-fluoro
  misc_feature (8)..(10): 2'-O-methyl
  misc_feature (11)..(13): 2'-deoxy-2'-fluoro
  misc_feature (14)..(14): 2'-O-methyl
  misc_feature (15)..(15): 2'-deoxy-2'-fluoro
  misc_feature (16)..(16): 2'-O-methyl
  misc_feature (17)..(17): 2'-deoxy-2'-fluoro
  misc_feature (18)..(19): 2'-O-methyl
  misc_feature (20)..(21): n stands for thymidine
  misc_feature (20)..(20): Phosphorothioate 3'-Internucleotide Linkage
gaauguuagguccaugcagnn

SEQ ID NO: 1679 - RNA, 21 nt, Artificial Sequence
  Description of Artificial Sequence:  siNA antisense region
  misc_feature (1)..(2): 2'-deoxy-2'-fluoro
  misc_feature (3)..(5): 2'-O-methyl
  misc_feature (6)..(6): 2'-deoxy-2'-fluoro
  misc_feature (7)..(7): 2'-O-methyl
  misc_feature (8)..(9): 2'-deoxy-2'-fluoro
  misc_feature (10)..(12): 2'-O-methyl
  misc_feature (13)..(15): 2'-deoxy-2'-fluoro
  misc_feature (16)..(16): 2'-O-methyl
  misc_feature (17)..(17): 2'-deoxy-2'-fluoro
  misc_feature (18)..(18): 2'-O-methyl
  misc_feature (19)..(19): 2'-deoxy-2'-fluoro
  misc_feature (20)..(21): n stands for thymidine
  misc_feature (20)..(20): Phosphorothioate 3'-Internucleotide Linkage
ucgaauguuagguccaugcnn

SEQ ID NO: 1680 - RNA, 21 nt, Artificial Sequence
  Description of Artificial Sequence:  siNA antisense region
  misc_feature (1)..(2): 2'-O-methyl
  misc_feature (3)..(4): 2'-deoxy-2'-fluoro
  misc_feature (5)..(7): 2'-O-methyl
  misc_feature (8)..(8): 2'-deoxy-2'-fluoro
  misc_feature (9)..(9): 2'-O-methyl
  misc_feature (10)..(11): 2'-deoxy-2'-fluoro
  misc_feature (12)..(14): 2'-O-methyl
  misc_feature (15)..(17): 2'-deoxy-2'-fluoro
  misc_feature (18)..(18): 2'-O-methyl
  misc_feature (19)..(19): 2'-deoxy-2'-fluoro
  misc_feature (20)..(21): n stands for thymidine
  misc_feature (20)..(20): Phosphorothioate 3'-Internucleotide Linkage
gaucgaauguuagguccaunn

SEQ ID NO: 1681 - RNA, 21 nt, Artificial Sequence
  Description of Artificial Sequence:  inverted control/siNA sense
  misc_feature (1)..(3): 2'-deoxy
  misc_feature (1)..(1): 5'-3 attached terminal deoxyabasic moeity
  misc_feature (4)..(7): 2'-deoxy-2'-fluoro
  misc_feature (8)..(12): 2'-deoxy
  misc_feature (13)..(13): 2'-deoxy-2'-fluoro
  misc_feature (14)..(19): 2'-deoxy
  misc_feature (20)..(21): n stands for thymidine
  misc_feature (21)..(21): 3'-3 attached terminal deoxyabasic moeity
aaguuccaaaagugaaaaann

SEQ ID NO: 1682 - RNA, 21 nt, Artificial Sequence
  Description of Artificial Sequence:  inverted control/siNA sense
  misc_feature (1)..(2): 2'-deoxy
  misc_feature (1)..(1): 5'-3 attached terminal deoxyabasic moeity
  misc_feature (3)..(3): 2'-deoxy-2'-fluoro
  misc_feature (4)..(5): 2'-deoxy
  misc_feature (6)..(6): 2'-deoxy-2'-fluoro
  misc_feature (7)..(7): 2'-deoxy
  misc_feature (8)..(8): 2'-deoxy-2'-fluoro
  misc_feature (9)..(10): 2'-deoxy
  misc_feature (11)..(12): 2'-deoxy-2'-fluoro
  misc_feature (13)..(13): 2'-deoxy
  misc_feature (14)..(14): 2'-deoxy-2'-fluoro
  misc_feature (15)..(15): 2'-deoxy
  misc_feature (16)..(18): 2'-deoxy-2'-fluoro
  misc_feature (19)..(19): 2'-deoxy
  misc_feature (20)..(21): n stands for thymidine
  misc_feature (21)..(21): 3'-3 attached terminal deoxyabasic moeity
gacgacgcaaucguacucann

SEQ ID NO: 1683 - RNA, 21 nt, Artificial Sequence
  Description of Artificial Sequence:  inverted control/siNA sense
  misc_feature (1)..(2): 2'-deoxy
  misc_feature (1)..(1): 5'-3 attached terminal deoxyabasic moeity
  misc_feature (3)..(3): 2'-deoxy-2'-fluoro
  misc_feature (4)..(4): 2'-deoxy
  misc_feature (5)..(5): 2'-deoxy-2'-fluoro
  misc_feature (6)..(6): 2'-deoxy
  misc_feature (7)..(8): 2'-deoxy-2'-fluoro
  misc_feature (9)..(13): 2'-deoxy
  misc_feature (14)..(15): 2'-deoxy-2'-fluoro
  misc_feature (16)..(17): 2'-deoxy
  misc_feature (18)..(19): 2'-deoxy-2'-fluoro
  misc_feature (20)..(21): n stands for thymidine
  misc_feature (21)..(21): 3'-3 attached terminal deoxyabasic moeity
gguacgucaagaaccaguunn

SEQ ID NO: 1684 - RNA, 21 nt, Artificial Sequence
  Description of Artificial Sequence:  inverted control/siNA sense
  misc_feature (1)..(1): 2'-deoxy
  misc_feature (1)..(1): 5'-3 attached terminal deoxyabasic moeity
  misc_feature (2)..(4): 2'-deoxy-2'-fluoro
  misc_feature (5)..(7): 2'-deoxy
  misc_feature (8)..(8): 2'-deoxy-2'-fluoro
  misc_feature (9)..(9): 2'-deoxy
  misc_feature (10)..(10): 2'-deoxy-2'-fluoro
  misc_feature (11)..(11): 2'-deoxy
  misc_feature (12)..(13): 2'-deoxy-2'-fluoro
  misc_feature (14)..(18): 2'-deoxy
  misc_feature (19)..(19): 2'-deoxy-2'-fluoro
  misc_feature (20)..(21): n stands for thymidine
  misc_feature (21)..(21): 3'-3 attached terminal deoxyabasic moeity
auccagguacgucaagaacnn

SEQ ID NO: 1685 - RNA, 21 nt, Artificial Sequence
  Description of Artificial Sequence:  inverted control/siNA sense
  misc_feature (1)..(2): 2'-deoxy-2'-fluoro
  misc_feature (1)..(1): 5'-3 attached terminal deoxyabasic moeity
  misc_feature (3)..(3): 2'-deoxy
  misc_feature (4)..(4): 2'-deoxy-2'-fluoro
  misc_feature (5)..(6): 2'-deoxy
  misc_feature (7)..(9): 2'-deoxy-2'-fluoro
  misc_feature (10)..(12): 2'-deoxy
  misc_feature (13)..(13): 2'-deoxy-2'-fluoro
  misc_feature (14)..(14): 2'-deoxy
  misc_feature (15)..(15): 2'-deoxy-2'-fluoro
  misc_feature (16)..(16): 2'-deoxy
  misc_feature (17)..(18): 2'-deoxy-2'-fluoro
  misc_feature (19)..(19): 2'-deoxy
  misc_feature (20)..(21): n stands for thymidine
  misc_feature (21)..(21): 3'-3 attached terminal deoxyabasic moeity
uuacaauccagguacgucann

SEQ ID NO: 1686 - RNA, 21 nt, Artificial Sequence
  Description of Artificial Sequence:  inverted control/siNA sense
  misc_feature (1)..(3): 2'-deoxy-2'-fluoro
  misc_feature (1)..(1): 5'-3 attached terminal deoxyabasic moeity
  misc_feature (4)..(4): 2'-deoxy
  misc_feature (5)..(5): 2'-deoxy-2'-fluoro
  misc_feature (6)..(7): 2'-deoxy
  misc_feature (8)..(10): 2'-deoxy-2'-fluoro
  misc_feature (11)..(13): 2'-deoxy
  misc_feature (14)..(14): 2'-deoxy-2'-fluoro
  misc_feature (15)..(15): 2'-deoxy
  misc_feature (16)..(16): 2'-deoxy-2'-fluoro
  misc_feature (17)..(17): 2'-deoxy
  misc_feature (18)..(19): 2'-deoxy-2'-fluoro
  misc_feature (20)..(21): n stands for thymidine
  misc_feature (21)..(21): 3'-3 attached terminal deoxyabasic moeity
cuuacaauccagguacgucnn

SEQ ID NO: 1687 - RNA, 21 nt, Artificial Sequence
  Description of Artificial Sequence:  inverted control/siNA sense
  misc_feature (1)..(2): 2'-deoxy
  misc_feature (1)..(1): 5'-3 attached terminal deoxyabasic moeity
  misc_feature (3)..(5): 2'-deoxy-2'-fluoro
  misc_feature (6)..(6): 2'-deoxy
  misc_feature (7)..(7): 2'-deoxy-2'-fluoro
  misc_feature (8)..(9): 2'-deoxy
  misc_feature (10)..(12): 2'-deoxy-2'-fluoro
  misc_feature (13)..(15): 2'-deoxy
  misc_feature (16)..(16): 2'-deoxy-2'-fluoro
  misc_feature (17)..(17): 2'-deoxy
  misc_feature (18)..(18): 2'-deoxy-2'-fluoro
  misc_feature (19)..(19): 2'-deoxy
  misc_feature (20)..(21): n stands for thymidine
  misc_feature (21)..(21): 3'-3 attached terminal deoxyabasic moeity
agcuuacaauccagguacgnn

SEQ ID NO: 1688 - RNA, 21 nt, Artificial Sequence
  Description of Artificial Sequence:  inverted control/siNA sense
  misc_feature (1)..(2): 2'-deoxy-2'-fluoro
  misc_feature (1)..(1): 5'-3 attached terminal deoxyabasic moeity
  misc_feature (3)..(4): 2'-deoxy
  misc_feature (5)..(7): 2'-deoxy-2'-fluoro
  misc_feature (8)..(8): 2'-deoxy
  misc_feature (9)..(9): 2'-deoxy-2'-fluoro
  misc_feature (10)..(11): 2'-deoxy
  misc_feature (12)..(14): 2'-deoxy-2'-fluoro
  misc_feature (15)..(17): 2'-deoxy
  misc_feature (18)..(18): 2'-deoxy-2'-fluoro
  misc_feature (19)..(19): 2'-deoxy
  misc_feature (20)..(21): n stands for thymidine
  misc_feature (21)..(21): 3'-3 attached terminal deoxyabasic moeity
cuagcuuacaauccagguann

SEQ ID NO: 1689 - RNA, 21 nt, Artificial Sequence
  Description of Artificial Sequence:  inverted control/siNA antisense
  misc_feature (1)..(6): 2'-deoxy-2'-fluoro
  misc_feature (7)..(7): 2'-O-methyl
  misc_feature (8)..(12): 2'-deoxy-2'-fluoro
  misc_feature (13)..(16): 2'-O-methyl
  misc_feature (17)..(19): 2'-deoxy-2'-fluoro
  misc_feature (20)..(21): n stands for thymidine
  misc_feature (20)..(20): Phosphorothioate 3'-Internucleotide Linkage
uuuuucacuuuuggaacuunn

SEQ ID NO: 1690 - RNA, 21 nt, Artificial Sequence
  Description of Artificial Sequence:  inverted control/siNA antisense
  misc_feature (1)..(1): 2'-deoxy-2'-fluoro
  misc_feature (2)..(4): 2'-O-methyl
  misc_feature (5)..(5): 2'-deoxy-2'-fluoro
  misc_feature (6)..(6): 2'-O-methyl
  misc_feature (7)..(7): 2'-deoxy-2'-fluoro
  misc_feature (8)..(9): 2'-O-methyl
  misc_feature (10)..(11): 2'-deoxy-2'-fluoro
  misc_feature (12)..(12): 2'-O-methyl
  misc_feature (13)..(13): 2'-deoxy-2'-fluoro
  misc_feature (14)..(14): 2'-O-methyl
  misc_feature (15)..(16): 2'-deoxy-2'-fluoro
  misc_feature (17)..(17): 2'-O-methyl
  misc_feature (18)..(19): 2'-deoxy-2'-fluoro
  misc_feature (20)..(21): n stands for thymidine
  misc_feature (20)..(20): Phosphorothioate 3'-Internucleotide Linkage
ugaguacgauugcgucgucnn

SEQ ID NO: 1691 - RNA, 21 nt, Artificial Sequence
  Description of Artificial Sequence:  inverted control/siNA antisense
  misc_feature (1)..(2): 2'-O-methyl
  misc_feature (3)..(4): 2'-deoxy-2'-fluoro
  misc_feature (5)..(6): 2'-O-methyl
  misc_feature (7)..(11): 2'-deoxy-2'-fluoro
  misc_feature (12)..(13): 2'-O-methyl
  misc_feature (14)..(14): 2'-deoxy-2'-fluoro
  misc_feature (15)..(15): 2'-O-methyl
  misc_feature (16)..(16): 2'-deoxy-2'-fluoro
  misc_feature (17)..(17): 2'-O-methyl
  misc_feature (18)..(19): 2'-deoxy-2'-fluoro
  misc_feature (20)..(21): n stands for thymidine
  misc_feature (20)..(20): Phosphorothioate 3'-Internucleotide Linkage
aacugguucuugacguaccnn

SEQ ID NO: 1692 - RNA, 21 nt, Artificial Sequence
  Description of Artificial Sequence:  inverted control/siNA antisense
  misc_feature (1)..(1): 2'-O-methyl
  misc_feature (2)..(6): 2'-deoxy-2'-fluoro
  misc_feature (7)..(8): 2'-O-methyl
  misc_feature (9)..(9): 2'-deoxy-2'-fluoro
  misc_feature (10)..(10): 2'-O-methyl
  misc_feature (11)..(11): 2'-deoxy-2'-fluoro
  misc_feature (12)..(12): 2'-O-methyl
  misc_feature (13)..(15): 2'-deoxy-2'-fluoro
  misc_feature (16)..(18): 2'-O-methyl
  misc_feature (19)..(19): 2'-deoxy-2'-fluoro
  misc_feature (20)..(21): n stands for thymidine
  misc_feature (20)..(20): Phosphorothioate 3'-Internucleotide Linkage
guucuugacguaccuggaunn

SEQ ID NO: 1693 - RNA, 21 nt, Artificial Sequence
  Description of Artificial Sequence:  inverted control/siNA antisense
  misc_feature (1)..(1): 2'-deoxy-2'-fluoro
  misc_feature (2)..(3): 2'-O-methyl
  misc_feature (4)..(4): 2'-deoxy-2'-fluoro
  misc_feature (5)..(5): 2'-O-methyl
  misc_feature (6)..(6): 2'-deoxy-2'-fluoro
  misc_feature (7)..(7): 2'-O-methyl
  misc_feature (8)..(10): 2'-deoxy-2'-fluoro
  misc_feature (11)..(13): 2'-O-methyl
  misc_feature (14)..(15): 2'-deoxy-2'-fluoro
  misc_feature (16)..(16): 2'-O-methyl
  misc_feature (17)..(17): 2'-deoxy-2'-fluoro
  misc_feature (18)..(19): 2'-O-methyl
  misc_feature (20)..(21): n stands for thymidine
  misc_feature (20)..(20): Phosphorothioate 3'-Internucleotide Linkage
ugacguaccuggauuguaann

SEQ ID NO: 1694 - RNA, 21 nt, Artificial Sequence
  Description of Artificial Sequence:  inverted control/siNA antisense
  misc_feature (1)..(2): 2'-O-methyl
  misc_feature (3)..(3): 2'-deoxy-2'-fluoro
  misc_feature (4)..(4): 2'-O-methyl
  misc_feature (5)..(5): 2'-deoxy-2'-fluoro
  misc_feature (6)..(6): 2'-O-methyl
  misc_feature (7)..(9): 2'-deoxy-2'-fluoro
  misc_feature (10)..(12): 2'-O-methyl
  misc_feature (13)..(14): 2'-deoxy-2'-fluoro
  misc_feature (15)..(15): 2'-O-methyl
  misc_feature (16)..(16): 2'-deoxy-2'-fluoro
  misc_feature (17)..(19): 2'-O-methyl
  misc_feature (20)..(21): n stands for thymidine
  misc_feature (20)..(20): Phosphorothioate 3'-Internucleotide Linkage
gacguaccuggauuguaagnn

SEQ ID NO: 1695 - RNA, 21 nt, Artificial Sequence
  Description of Artificial Sequence:  inverted control/siNA antisense
  misc_feature (1)..(1): 2'-deoxy-2'-fluoro
  misc_feature (2)..(2): 2'-O-methyl
  misc_feature (3)..(3): 2'-deoxy-2'-fluoro
  misc_feature (4)..(4): 2'-O-methyl
  misc_feature (5)..(7): 2'-deoxy-2'-fluoro
  misc_feature (8)..(10): 2'-O-methyl
  misc_feature (11)..(12): 2'-deoxy-2'-fluoro
  misc_feature (13)..(13): 2'-O-methyl
  misc_feature (14)..(14): 2'-deoxy-2'-fluoro
  misc_feature (15)..(17): 2'-O-methyl
  misc_feature (18)..(19): 2'-deoxy-2'-fluoro
  misc_feature (20)..(21): n stands for thymidine
  misc_feature (20)..(20): Phosphorothioate 3'-Internucleotide Linkage
cguaccuggauuguaagcunn

SEQ ID NO: 1696 - RNA, 21 nt, Artificial Sequence
  Description of Artificial Sequence:  inverted control/siNA antisense
  misc_feature (1)..(1): 2'-deoxy-2'-fluoro
  misc_feature (2)..(2): 2'-O-methyl
  misc_feature (3)..(5): 2'-deoxy-2'-fluoro
  misc_feature (6)..(8): 2'-O-methyl
  misc_feature (9)..(10): 2'-deoxy-2'-fluoro
  misc_feature (11)..(11): 2'-O-methyl
  misc_feature (12)..(12): 2'-deoxy-2'-fluoro
  misc_feature (13)..(15): 2'-O-methyl
  misc_feature (16)..(17): 2'-deoxy-2'-fluoro
  misc_feature (18)..(19): 2'-O-methyl
  misc_feature (20)..(21): n stands for thymidine
  misc_feature (20)..(20): Phosphorothioate 3'-Internucleotide Linkage
uaccuggauuguaagcuagnn

SEQ ID NO: 1697 - RNA, 21 nt, Artificial Sequence
  Description of Artificial Sequence:  siNA sense region
  misc_feature (1)..(1): 5'-3 attached terminal deoxyabasic moeity
  misc_feature (21)..(21): 3'-3 attached terminal deoxyabasic moeity
  misc_feature (1)..(19): n stands for any ribonucleotide
  misc_feature (20)..(21): n stands for any nucleotide
nnnnnnnnnnnnnnnnnnnnn

SEQ ID NO: 1698 - RNA, 21 nt, Artificial Sequence
  Description of Artificial Sequence:  siNA antisense region
  misc_feature (20)..(20): Phosphorothioate 3'-Internucleotide Linkage
  misc_feature (1)..(19): n stands for any ribonucleotide
  misc_feature (20)..(21): n stands for any nucleotide
  misc_feature (21)..(21): 3'-3 attached terminal glyceryl moeity
nnnnnnnnnnnnnnnnnnnnn

SEQ ID NO: 1699 - RNA, 21 nt, Artificial Sequence
  Description of Artificial Sequence:  siNA sense region
  misc_feature (1)..(19): n stands for any nucleotide wherein any pyrimidine nucleotide present is 2'-Fluoro and any purine nuc leotide present is 2'-O-methyl
  misc_feature (20)..(21): n stands for any nucleotide
nnnnnnnnnnnnnnnnnnnnn

SEQ ID NO: 1700 - RNA, 21 nt, Artificial Sequence
  Description of Artificial Sequence:  siNA antisense region
  misc_feature (1)..(19): n stands for any nucleotide wherein any pyrimidine nucleotide present is 2'-Fluoro and any purine nuc leotide present is 2'-O-methyl
  misc_feature (20)..(21): n stands for any nucleotide
  misc_feature (21)..(21): 3'-3 attached terminal glyceryl moeity
  misc_feature (20)..(20): Phosphorothioate 3'-Internucleotide Linkage
nnnnnnnnnnnnnnnnnnnnn

SEQ ID NO: 1701 - RNA, 21 nt, Artificial Sequence
  Description of Artificial Sequence:  siNA sense region
  misc_feature (1)..(19): n stands for any nucleotide wherein any pyrimidine nucleotide present is 2'-O-methyl or 2'-Fluoro
  misc_feature (20)..(21): n stands for any nucleotide
  misc_feature (1)..(1): 5'-3 attached terminal deoxyabasic moeity
  misc_feature (21)..(21): 3'-3 attached terminal deoxyabasic moeity
nnnnnnnnnnnnnnnnnnnnn

SEQ ID NO: 1702 - RNA, 21 nt, Artificial Sequence
  Description of Artificial Sequence:  siNA antisense region
  misc_feature (1)..(19): n stands for any nucleotide wherein any pyrimidine nucleotide present is 2'-Fluoro
  misc_feature (20)..(20): Phosphorothioate 3'-Internucleotide Linkage
  misc_feature (20)..(21): n stands for any nucleotide
  misc_feature (21)..(21): 3'-3 attached terminal glyceryl moeity
nnnnnnnnnnnnnnnnnnnnn

SEQ ID NO: 1703 - RNA, 21 nt, Artificial Sequence
  Description of Artificial Sequence:  siNA sense region
  misc_feature (1)..(19): n stands for any nucleotide wherein any pyrimidine nucleotide present is 2'-Fluoro and any purine nucleotide present is 2'-Deoxy
  misc_feature (20)..(21): n stands for any nucleotide
  misc_feature (1)..(1): 5'-3 attached terminal deoxyabasic moeity
  misc_feature (21)..(21): 3'-3 attached terminal deoxyabasic moeity
nnnnnnnnnnnnnnnnnnnnn

SEQ ID NO: 1704 - RNA, 21 nt, Artificial Sequence
  Description of Artificial Sequence:  siNA sense region
  misc_feature (1)..(19): n stands for any nucleotide wherein any pyrimidine nucleotide present is 2'-Fluoro
  misc_feature (20)..(21): n stands for any nucleotide
  misc_feature (1)..(1): 5'-3 attached terminal deoxyabasic moeity
  misc_feature (21)..(21): 3'-3 attached terminal deoxyabasic moeity
nnnnnnnnnnnnnnnnnnnnn

SEQ ID NO: 1705 - RNA, 21 nt, Artificial Sequence
  Description of Artificial Sequence:  siNA antisense region
  misc_feature (1)..(19): n stands for any nucleotide wherein any pyrimidine nucleotide present is 2'-Fluoro and any purine nucleotide present is 2'-Deoxy
  misc_feature (20)..(20): Phosphorothioate 3'-Internucleotide Linkage
  misc_feature (20)..(21): n stands for any nucleotide
  misc_feature (21)..(21): 3'-3 attached terminal glyceryl moeity
nnnnnnnnnnnnnnnnnnnnn

SEQ ID NO: 1706 - RNA, 21 nt, Artificial Sequence
  Description of Artificial Sequence:  siNA sense region
  misc_feature (1)..(1): 5'-3 attached terminal deoxyabasic moeity
  misc_feature (21)..(21): 3'-3 attached terminal deoxyabasic moeity
  misc_feature (20)..(21): n stands for thymidine
augaaccacguuaacagugnn

SEQ ID NO: 1707 - RNA, 21 nt, Artificial Sequence
  Description of Artificial Sequence:  siNA antisense region
  misc_feature (20)..(20): Phosphorothioate 3'-Internucleotide Linkage
  misc_feature (20)..(21): n stands for thymidine
  misc_feature (21)..(21): 3'-3 attached terminal glyceryl moeity
cacuguuaacgugguucaunn

SEQ ID NO: 1708 - RNA, 21 nt, Artificial Sequence
  Description of Artificial Sequence:  siNA sense region
  misc_feature (1)..(1): 2'-O-methyl
  misc_feature (3)..(5): 2'-O-Methyl
  misc_feature (8)..(8): 2'-O-Methyl
  misc_feature (10)..(10): 2'-O-Methyl
  misc_feature (13)..(14): 2'-O-Methyl
  misc_feature (16)..(17): 2'-O-Methyl
  misc_feature (19)..(19): 2'-O-Methyl
  misc_feature (2)..(2): 2'-deoxy-2'-fluoro
  misc_feature (6)..(7): 2'-deoxy-2'-fluoro
  misc_feature (9)..(9): 2'-deoxy-2'-fluoro
  misc_feature (11)..(12): 2'-deoxy-2'-fluoro
  misc_feature (15)..(15): 2'-deoxy-2'-fluoro
  misc_feature (18)..(18): 2'-deoxy-2'-fluoro
  misc_feature (20)..(21): n stands for thymidine
augaaccacguuaacagugnn

SEQ ID NO: 1709 - RNA, 21 nt, Artificial Sequence
  Description of Artificial Sequence:  siNA antisense region
  misc_feature (2)..(2): 2'-O-Methyl
  misc_feature (5)..(5): 2'-O-Methyl
  misc_feature (8)..(9): 2'-O-Methyl
  misc_feature (11)..(11): 2'-O-Methyl
  misc_feature (13)..(14): 2'-O-Methyl
  misc_feature (18)..(18): 2'-O-Methyl
  misc_feature (1)..(1): 2'-deoxy-2'-fluoro
  misc_feature (3)..(4): 2'-deoxy-2'-fluoro
  misc_feature (6)..(7): 2'-deoxy-2'-fluoro
  misc_feature (10)..(10): 2'-deoxy-2'-fluoro
  misc_feature (12)..(12): 2'-deoxy-2'-fluoro
  misc_feature (15)..(17): 2'-deoxy-2'-fluoro
  misc_feature (19)..(19): 2'-deoxy-2'-fluoro
  misc_feature (20)..(21): n stands for thymidine
  misc_feature (20)..(20): Phosphorothioate 3'-Internucleotide Linkage
  misc_feature (21)..(21): 3'-3 attached terminal glyceryl moeity
cacuguuaacgugguucaunn

SEQ ID NO: 1710 - RNA, 21 nt, Artificial Sequence
  Description of Artificial Sequence:  siNA sense region
  misc_feature (2)..(2): 2'-O-Methyl or 2'-deoxy-2'-fluoro
  misc_feature (6)..(7): 2'-O-Methyl or 2'-deoxy-2'-fluoro
  misc_feature (9)..(9): 2'-O-Methyl or 2'-deoxy-2'-fluoro
  misc_feature (11)..(12): 2'-O-Methyl or 2'-deoxy-2'-fluoro
  misc_feature (15)..(15): 2'-O-Methyl or 2'-deoxy-2'-fluoro
  misc_feature (18)..(18): 2'-O-Methyl or 2'-deoxy-2'-fluoro
  misc_feature (1)..(1): 5'-3 attached terminal deoxyabasic moeity
  misc_feature (21)..(21): 3'-3 attached terminal deoxyabasic moeity
  misc_feature (20)..(21): n stands for thymidine
augaaccacguuaacagugnn

SEQ ID NO: 1711 - RNA, 21 nt, Artificial Sequence
  Description of Artificial Sequence:  siNA antisense region
  misc_feature (1)..(1): 2'-deoxy-2'-fluoro
  misc_feature (3)..(4): 2'-deoxy-2'-fluoro
  misc_feature (6)..(7): 2'-deoxy-2'-fluoro
  misc_feature (10)..(10): 2'-deoxy-2'-fluoro
  misc_feature (12)..(12): 2'-deoxy-2'-fluoro
  misc_feature (15)..(17): 2'-deoxy-2'-fluoro
  misc_feature (19)..(19): 2'-deoxy-2'-fluoro
  misc_feature (20)..(20): Phosphorothioate 3'-Internucleotide Linkage
  misc_feature (20)..(21): n stands for thymidine
  misc_feature (21)..(21): 3'-3 attached terminal glyceryl moeity
cacuguuaacgugguuuaunn

SEQ ID NO: 1712 - RNA, 21 nt, Artificial Sequence
  Description of Artificial Sequence:  siNA sense region
  misc_feature (1)..(1): 2'-deoxy
  misc_feature (3)..(5): 2'-deoxy
  misc_feature (8)..(8): 2'-deoxy
  misc_feature (10)..(10): 2'-deoxy
  misc_feature (13)..(14): 2'-deoxy
  misc_feature (16)..(17): 2'-deoxy
  misc_feature (19)..(19): 2'-deoxy
  misc_feature (2)..(2): 2'-deoxy-2'-fluoro
  misc_feature (6)..(7): 2'-deoxy-2'-fluoro
  misc_feature (9)..(9): 2'-deoxy-2'-fluoro
  misc_feature (11)..(12): 2'-deoxy-2'-fluoro
  misc_feature (15)..(15): 2'-deoxy-2'-fluoro
  misc_feature (18)..(18): 2'-deoxy-2'-fluoro
  misc_feature (1)..(1): 5'-3 attached terminal deoxyabasic moeity
  misc_feature (21)..(21): 3'-3 attached terminal deoxyabasic moeity
  misc_feature (20)..(21): n stands for thymidine
augaaccacguuaacagugnn

SEQ ID NO: 1713 - RNA, 21 nt, Artificial Sequence
  Description of Artificial Sequence:  siNA sense region
  misc_feature (2)..(2): 2'-deoxy-2'-fluoro
  misc_feature (6)..(7): 2'-deoxy-2'-fluoro
  misc_feature (9)..(9): 2'-deoxy-2'-fluoro
  misc_feature (11)..(12): 2'-deoxy-2'-fluoro
  misc_feature (15)..(15): 2'-deoxy-2'-fluoro
  misc_feature (18)..(18): 2'-deoxy-2'-fluoro
  misc_feature (1)..(1): 5'-3 attached terminal deoxyabasic moeity
  misc_feature (21)..(21): 3'-3 attached terminal deoxyabasic moeity
  misc_feature (20)..(21): n stands for thymidine
augaaccacguuaacagugnn

SEQ ID NO: 1714 - RNA, 21 nt, Artificial Sequence
  Description of Artificial Sequence:  siNA antisense region
  misc_feature (2)..(2): 2'-deoxy
  misc_feature (5)..(5): 2'-deoxy
  misc_feature (8)..(9): 2'-deoxy
  misc_feature (11)..(11): 2'-deoxy
  misc_feature (13)..(14): 2'-deoxy
  misc_feature (18)..(18): 2'-deoxy
  misc_feature (1)..(1): 2'-deoxy-2'-fluoro
  misc_feature (3)..(4): 2'-deoxy-2'-fluoro
  misc_feature (6)..(7): 2'-deoxy-2'-fluoro
  misc_feature (10)..(10): 2'-deoxy-2'-fluoro
  misc_feature (12)..(12): 2'-deoxy-2'-fluoro
  misc_feature (15)..(17): 2'-deoxy-2'-fluoro
  misc_feature (19)..(19): 2'-deoxy-2'-fluoro
  misc_feature (20)..(20): Phosphorothioate 3'-Internucleotide Linkage
  misc_feature (20)..(21): n stands for thymidine
  misc_feature (21)..(21): 3'-3 attached terminal glyceryl moeity
cacuguuaacgugguuuaunn
